(19) United States
(12) Patent Application Publication
(10) Pub. No.: US 2024/0360433 A1
(43) Pub. Date: Oct. 31, 2024

(54) COMPOSITIONS AND METHODS FOR THE TREATMENT OF HEREDITARY ANGIOEDEMA (HAE)

(71) Applicant: Beam Therapeutics Inc., Cambridge, MA (US)

(72) Inventors: Tanggis BOHNUUD, Cambridge, MA (US); Genesis LUNG, Cambridge, MA (US)

(73) Assignee: Beam Therapeutics Inc., Cambridge, MA (US)

(21) Appl. No.: 18/661,004

(22) Filed: May 10, 2024

Related U.S. Application Data
(63) Continuation of application No. PCT/US2022/079739, filed on Nov. 11, 2022.
(60) Provisional application No. 63/278,417, filed on Nov. 11, 2021.

(51) Int. Cl. C12N 9/78; A61K 48/00; C12N 15/11

(52) U.S. Cl. CPC C12N 9/78; A61K 48/005; C12N 15/111; C12Y 305/04004; C12Y 305/04005

(57) ABSTRACT

The invention of the disclosure features compositions and methods for treating hereditary angioedema by introducing one or more alterations to a kallikrein B1 (KLKB1) polynucleotide in a cell. In particular embodiments, the invention provides a base editor system (e.g., a fusion protein or complex comprising a programmable DNA binding protein, a nucleobase editor, and gRNA) for modifying a KLKB1 polynucleotide, where the modification is associated with reduced expression and/or reduced activity of the KLKB1 polypeptide encoded by the polynucleotide.

### CROSS REFERENCE TO RELATED APPLICATIONS

[0001] This application is a continuation of PCT International Application No. PCT/US2022/079739, filed Nov. 11, 2022, which claims priority and the benefit of U.S. Provisional Application No. 63/278,417 filed Nov. 11, 2021, the entire contents of which are hereby incorporated by reference in its entirety.

### SEQUENCE LISTING

[0002] This application contains a Sequence Listing which has been submitted electronically in XML format and is hereby incorporated by reference in its entirety. The Sequence Listing XML file, created on Jul. 1, 2024, is named 180802_045402_SL.xml and is 1,281,372 bytes in size.

### BACKGROUND OF THE INVENTION

[0003] Hereditary angioedema, or HAE, is a rare and potentially life-threatening genetic condition that involves recurrent attacks of severe swelling (angioedema) in various parts of the body, including the hands, feet, genitals, stomach, face and/or throat. Swelling in the airway can restrict breathing and be fatal. Episodes may be triggered by physical trauma or emotional stress, however, swelling often occurs without a known trigger. Hereditary angioedema affects males and females in equal numbers. An estimated one in 50,000 to 150,000 individuals are affected by this disorder worldwide.

[0004] Symptoms of HAE usually appear early in life, most often by age 13, and may increase in severity after puberty. Because HAE is so rare, it can take as long as a decade to obtain an accurate diagnosis after symptoms are first experienced.

[0005] When untreated, an HAE attack often lasts for three days, sometimes even longer, and many people with HAE experience three or more swelling attacks per month. The frequency and severity of attacks vary significantly among individuals, even among affected family members. Therefore, improved methods for treating hereditary angioedema are urgently required.

### SUMMARY OF THE INVENTION

[0006] As described below, the invention of the present disclosure features compositions and methods for treating hereditary angioedema by introducing one or more alterations into a kallikrein B1 (KLKB1) polynucleotide in a cell. In particular embodiments, the invention provides a base editor system (e.g., a fusion protein or complex comprising a programmable DNA binding protein, a nucleobase editor, and gRNA) for modifying a KLKB1 polynucleotide, where the modification is associated with reduced expression, and/or reduced activity of the KLKB1 polypeptide encoded by the polynucleotide. Non-limiting examples of alterations include base edits and/or double-strand cuts.

[0007] In one aspect, the invention features a method of editing a nucleobase of a kallikrein B1 (KLKB1) polynucleotide in a cell. The method involves contacting the KLKB1 polynucleotide with one or more guide polynucleotides and a base editor containing a fusion protein or a protein complex containing a nucleic acid programmable DNA binding protein (napDNAbp) domain and a deaminase domain, or a polynucleotide encoding the base editor. The guide polynucleotide targets the base editor to effect an alteration of the nucleobase of the KLKB1 polynucleotide.

[0008] In another aspect, the invention features a method of treating hereditary angioedema in a subject in need thereof. The method involves administering to a cell of the subject a base editor containing a fusion protein or protein complex containing a nucleic acid programmable DNA binding protein (napDNAbp) domain and a deaminase domain, or a polynucleotide encoding the base editor, and a guide polynucleotide that targets the base editor to effect an alteration of a nucleobase of a KLKB1 polynucleotide, thereby treating hereditary angioedema in the subject.

[0009] In another aspect, the invention features a method of modifying an KLKB1 polynucleotide in a cell. The method involves contacting the KLKB1 polynucleotide with a nucleic acid programmable DNA binding protein domain (napDNAbp) having endonuclease activity on both strands of a double-stranded DNA molecule and a guide polynucleotide. The guide polynucleotide targets the napDNAbp to cleave the KLKB1 polynucleotide, thereby altering the expression or activity of an encoded gene product.

[0010] In another aspect, the invention features a method of treating hereditary angioedema in a subject in need thereof. The method involves administering to a cell of the subject with a nucleic acid programmable DNA binding protein domain (napDNAbp) having endonuclease activity and a guide polynucleotide. The guide polynucleotide targets the napDNAbp to cleave the KLKB1 polynucleotide, thereby treating hereditary angioedema in the subject.

[0011] In another aspect, the invention features a modified cell containing an alteration in a nucleobase of an KLKB1 polynucleotide. There the alteration is prepared by the method of any of the above aspects, and where the alteration reduces or eliminates expression and/or function of the encoded KLKB1 polypeptide as compared to a control cell without the modification.

[0012] In another aspect, the invention features a base editor system containing a fusion protein or a polynucleotide encoding the fusion protein. The fusion protein contains a nucleic acid programmable DNA binding protein domain (napDNAbp), a deaminase domain, and a guide polynucleotide that contains at least 10, 11, 12, 13, 14, 15, 16, 17, 18, 19, or 20 contiguous nucleobases of a spacer listed in Table 1A or Table 1B.

[0013] In another aspect, the invention features a polynucleotide encoding the base editor system of any of the above aspects, or a component thereof.

[0014] In another aspect, the invention provides a cell produced by the method of any of the above aspects.

[0015] In another aspect, the invention provides a kit containing a base editor system containing a fusion protein or a polynucleotide encoding the fusion protein. The fusion protein contains a nucleic acid programmable DNA binding protein domain (napDNAbp), a deaminase domain, and a guide polynucleotide that contains least about 10, 11, 12, 13, 14, 15, 16, 17, 18, 19, or 20 contiguous nucleobases of a spacer sequence listed in Table 1A or Table 1B.

[0016] In another aspect, the invention provides a pharmaceutical composition containing an effective amount of a base editor system containing a fusion protein or a polynucleotide encoding the fusion protein. The fusion protein contains a nucleic acid programmable DNA binding protein domain (napDNAbp), a deaminase domain, and a guide polynucleotide that contains at least about 10, 11, 12, 13, 14, 15, 16, 17, 18, 19, or 20 contiguous nucleobases of a spacer listed in Table 1A or Table 1B.

[0017] In another aspect, the invention provides a guide polynucleotide containing a sequence listed in Table 1A or Table 1B.

[0018] In any of the above aspects, or embodiments thereof, the cell is in vivo or in vitro. In any of the above aspects, or embodiments thereof, the cell is a mammalian cell. In any of the above aspects, or embodiments thereof, the cell is a liver cell. In embodiments, the cell is in a rodent or human. In any of the above aspects, or embodiments thereof, the KLKB1 polynucleotide or the cell is contacted with two or more guide polynucleotides, where each guide polynucleotide binds a different location within the KLKB1 polynucleotide. In any of the above aspects, or embodiments thereof, the guide polynucleotide contains one or more of the spacers listed in Table 1A or Table 1B.

[0019] In any of the above aspects, or embodiments thereof, the deaminase is an adenosine deaminase or a cytidine deaminase. In any of the above aspects, or embodiments thereof, the adenosine deaminase converts a target A•T to G•C in the KLKB1 polynucleotide. In any of the above aspects, or embodiments thereof, the cytidine deaminase converts a target C•G to T•A in the KLKB1 polynucleotide. In any of the above aspects, or embodiments thereof, alteration of the nucleobase is associated with a reduction in transcription of a polynucleotide sequence encoding the KLKB1 protein. In any of the above aspects, or embodiments thereof, alteration of the nucleobase in the KLKB1 polynucleotide results in a missense mutation. In any of the above aspects, or embodiments thereof, alteration of the nucleobase in the KLKB1 polynucleotide disrupts a splice site. In any of the above aspects, or embodiments thereof, the alteration disrupts a splice acceptor (SA) or a splice donor (SD) site. In any of the above aspects, or embodiments thereof, the alteration results in a premature STOP codon.

[0020] In any of the above aspects, or embodiments thereof, the napDNAbp domain contains a Cas9, Cas12a/Cpf1, Cas12b/C2c1, Cas12c/C2c3, Cas12d/CasY, Cas12e/CasX, Cas12g, Cas12h, Cas12i, or Cas12j/CasΦ polynucleotide or a portion thereof. In any of the above aspects, or embodiments thereof, napDNAbp domain contains a Cas9 polynucleotide or a portion thereof having endonuclease activity on both strands of a double-stranded DNA molecule. In any of the above aspects, or embodiments thereof, the napDNAbp domain contains a dead Cas9 (dCas9) or a Cas9 nickase (nCas9). In any of the above aspects, or embodiments thereof, the napDNAbp domain is a modified Staphylococcus aureus Cas9 (SaCas9), Streptococcus thermophilus 1 Cas9 (St1Cas9), a modified Streptococcus pyogenes Cas9 (SpCas9), or a variant thereof. In any of the above aspects, or embodiments thereof, the napDNAbp domain contains a variant of SpCas9 having an altered protospacer-adjacent motif (PAM) specificity.

[0021] In any of the above aspects, or embodiments thereof, the cytidine deaminase domain is an APOBEC deaminase domain or a derivative thereof. In any of the above aspects, or embodiments thereof, the adenosine deaminase domain is TadA deaminase domain. In any of the above aspects, or embodiments thereof, the adenosine deaminase domain is a TadA*8 variant. In any of the above aspects, or embodiments thereof, the adenosine deaminase domain is TadA*8.1, TadA*8.2, TadA*8.3, TadA*8.4, TadA*8.5, TadA*8.6, TadA*8.7, TadA*8.8, TadA*8.9, TadA*8.10, TadA*8.11, TadA*8.12, TadA*8.13, TadA*8.14, TadA*8.15, TadA*8.16, TadA*8.17, TadA*8.18, TadA*8.19, TadA*8.20, TadA*8.21, TadA*8.22, TadA*8.23, or TadA*8.24.

[0022] In any of the above aspects, or embodiments thereof, guide polynucleotide contains a nucleic acid sequence containing at least 10, 11, 12, 13, 14, 15, 16, 17, 18, 19, or 20 contiguous nucleotides of a spacer nucleic acid sequence listed in Table 1A or Table 1B. In any of the above aspects, or embodiments thereof, the guide polynucleotide contains a nucleic acid sequence listed in Table 1A or Table 1B. In any of the above aspects, or embodiments thereof, the guide polynucleotide contains a nucleic acid analog. In any of the above aspects, or embodiments thereof, the guide polynucleotide contains one or more of a 2′-OMe and a phosphorothioate.

[0023] In any of the above aspects, or embodiments thereof, the base editor further contains one or more uracil glycosylase inhibitors (UGIs). In any of the above aspects, or embodiments thereof, the base editor further contains one or more nuclear localization sequences (NLS).

[0024] In any of the above aspects, or embodiments thereof, expression and/or function is reduced by at least 50%, at least 60%, at least 70%, at least 80%, at least 90%, or at least 100% as compared to a control cell without the modification. In any of the above aspects, or embodiments thereof, the alteration introduces a premature stop codon, a missense mutation, or disrupts a splice site.

[0025] In any of the above aspects, or embodiments thereof, the cell is a hepatocyte.

[0026] In any of the above aspects, or embodiments thereof, the fusion protein further contains one or more uracil glycosylase inhibitors (UGIs). In any of the above aspects, or embodiments thereof, the fusion protein further contains one or more nuclear localization sequences (NLS).

[0027] In any of the above aspects, or embodiments thereof, the napDNAbp is a nuclease inactive or nickase variant. In any of the above aspects, or embodiments thereof, the napDNAbp contains a Cas9, Cas12a/Cpf1, Cas12b/C2c1, Cas12c/C2c3, Cas12d/CasY, Cas12e/CasX, Cas12g, Cas12h, Cas12i, or Cas12j/CasΦ polynucleotide or a portion thereof. In any of the above aspects, or embodiments thereof, the napDNAbp contains a Cas9 polynucleotide or a portion thereof having endonuclease activity on both strands of a double-stranded DNA molecule. In any of the above aspects, or embodiments thereof, the napDNAbp contains a dead Cas9 (dCas9) or a Cas9 nickase (nCas9). In any of the above aspects, or embodiments thereof, the napDNAbp is a modified Staphylococcus aureus Cas9 (SaCas9), Streptococcus thermophilus 1 Cas9 (St1Cas9), a modified Streptococcus pyogenes Cas9 (SpCas9), or variants thereof. In any of the above aspects, or embodiments thereof, the napDNAbp contains a variant of SpCas9 having an altered protospacer-adjacent motif (PAM) specificity.

[0028] In any of the above aspects, or embodiments thereof, the deaminase domain is capable of deaminating cytidine or adenine in DNA. In any of the above aspects, or embodiments thereof, the deaminase domain is a cytidine deaminase domain. In any of the above aspects, or embodiments thereof, the cytidine deaminase is an APOBEC deaminase or a derivative thereof.

[0029] In any of the above aspects, or embodiments thereof, the deaminase domain is an adenosine deaminase domain. In any of the above aspects, or embodiments thereof, the adenosine deaminase is a TadA*8 variant. In any of the above aspects, or embodiments thereof, the adenosine deaminase is TadA*8.1, TadA*8.2, TadA*8.3, TadA*8.4, TadA*8.5, TadA*8.6, TadA*8.7, TadA*8.8, TadA*8.9, TadA*8.10, TadA*8.11, TadA*8.12, TadA*8.13, TadA*8.14, TadA*8.15, TadA*8.16, TadA*8.17, TadA*8.18, TadA*8.19, TadA*8.20, TadA*8.21, TadA*8.22, TadA*8.23, or TadA*8.24. In any of the above aspects, or embodiments thereof, the deaminase domain is a monomer or heterodimer.

[0030] In any of the above aspects, or embodiments thereof, the kit further contains written instructions for the use of the kit in the treatment of hereditary angioedema.

[0031] In any of the above aspects, or embodiments thereof, the cell is in vivo or in vitro. In any of the above aspects, or embodiments thereof, the cell is a mammalian cell. In any of the above aspects, or embodiments thereof, the cell is a rodent or human cell.

[0032] In any of the above aspects, or embodiments thereof, the cell is contacted with two or more guide polynucleotides, where each guide polynucleotide binds a different location within the AGT polynucleotide. In any of the above aspects, or embodiments thereof, the guide polynucleotide contains a spacer sequence selected from those listed in Table 1A or Table 1B.

[0033] In any of the above aspects, or embodiments thereof, the napDNAbp contains a Cas9, Cas12a/Cpf1, Cas12b/C2c1, Cas12c/C2c3, Cas12d/CasY, Cas12e/CasX, Cas12g, Cas12h, Cas12i, or Cas12j/CasΦ polynucleotide or a portion thereof. In any of the above aspects, or embodiments thereof, the napDNAbp contains a Cas9 polynucleotide or a portion thereof. In any of the above aspects, or embodiments thereof, the napDNAbp domain contains a modified Staphylococcus aureus Cas9 (SaCas9), Streptococcus thermophilus 1 Cas9 (St1Cas9), a modified Streptococcus pyogenes Cas9 (SpCas9), or variants thereof.

[0034] In any of the above aspects, or embodiments thereof, the target base editing efficiency is at least about 20%. In any of the above aspects, or embodiments thereof, the target base editing efficiency is at least about 40%. In any of the above aspects, or embodiments thereof, the target base editing efficiency is at least about 50%.

[0035] In any of the above aspects, or embodiments thereof, alteration of the nucleobase is associated with a reduction in KLKB1 protein levels of at least about 50% relative to a reference cell. In any of the above aspects, or embodiments thereof, alteration of the nucleobase is associated with a reduction in KLKB1 protein levels of at least about 30% relative to a reference cell.

[0036] In any of the above aspects, or embodiments thereof, the deaminase domain is inserted within the napDNAbp domain. In any of the above aspects, or embodiments thereof, the base editor is selected from the group consisting of ABE8.8, IBE3, IBE6, ABE8.8-MQKFRAER, ABE8.8-VRQR, IBE3-MQKFRAER, and IBE6-VRQR.

[0037] In any of the above aspects, or embodiments thereof, the guide polynucleotide comprises a spacer corresponding to a guide polynucleotide selected from the group consisting of gRNA1074, gRNA1090, gRNA1104, gRNA1108, gRNA1115, gRNA1150, gRNA1151, gRNA1158, gRNA1159, gRNA1166, or gRNA1178. In any of the above aspects, or embodiments thereof, the guide polynucleotide comprises a guide polynucleotide sequence selected from the group consisting of gRNA1074, gRNA1090, gRNA1104, gRNA1108, gRNA1115, gRNA1150, gRNA1151, gRNA1158, gRNA1159, gRNA1166, and gRNA1178.

### Definitions

[0038] Unless defined otherwise, all technical and scientific terms used herein have the meaning commonly understood by a person skilled in the art to which this invention belongs. The following references provide one of skill with a general definition of many of the terms used in this invention: Singleton et al., Dictionary of Microbiology and Molecular Biology (2nd ed. 1994); The Cambridge Dictionary of Science and Technology (Walker ed., 1988); The Glossary of Genetics, 5th Ed., R. Rieger et al. (eds.), Springer Verlag (1991); and Hale & Marham, The Harper Collins Dictionary of Biology (1991). As used herein, the following terms have the meanings ascribed to them below, unless specified otherwise.

[0039] By “kallikrein B1 (KLKB1) polypeptide” is meant a KLKB1 protein or fragment thereof, having at least about 85% amino acid sequence identity to a polypeptide sequence provided at Ensemble Transcript Accession No. ENST00000264690.11 and that functions in surface-dependent activation of blood coagulation. An exemplary KLKB1 polypeptide amino acid sequence from Homo Sapiens is provided below (Ensemble Transcript Accession No. ENST00000264690.11):

(SEQ ID NO: 378)
MILFKQATYFISLFATVSCGCLTQLYENAFFRGGDVASMYTPNAQYCQMRCTFHPRCLLFSFLPASSIND
MEKRFGCFLKDSVTGTLPKVHRTGAVSGHSLKQCGHQISACHRDIYKGVDMRGVNFNVSKVSSVEECQKR
CTSNIRCQFFSYATQTFHKAEYRNNCLLKYSPGGTPTAIKVLSNVESGFSLKPCALSEIGCHMNIFQHLA
FSDVDVARVLTPDAFVCRTICTYHPNCLFFTFYTNVWKIESQRNVCLLKTSESGTPSSSTPQENTISGYS
LLTCKRTLPEPCHSKIYPGVDFGGEELNVTFVKGVNVCQETCTKMIRCQFFTYSLLPEDCKEEKCKCFLR
LSMDGSPTRIAYGTQGSSGYSLRLCNTGDNSVCTTKTSTRIVGGTNSSWGEWPWQVSLQVKLTAQRHLCG
GSLIGHQWVLTAAHCFDGLPLQDVWRIYSGILNLSDITKDTPFSQIKEIIIHQNYKVSEGNHDIALIKLQ
APLNYTEFQKPICLPSKGDTSTIYTNCWVTGWGFSKEKGEIQNILQKVNIPLVTNEECQKRYQDYKITQR
MVCAGYKEGGKDACKGDSGGPLVCKINGMWRLVGITSWGEGCARREQPGVYTKVAEYMDWILEKTQSSDG
KAQMQSPA.

[0040] By “kallikrein B1 (KLKB1) polynucleotide” is meant a nucleic acid molecule encoding a KLKB1 polypeptide, as well as the introns, exons, and regulatory sequences associated with its expression, or fragments thereof. In embodiments, a KLKB1 polynucleotide is the genomic sequence, mRNA, or gene associated with and/or required for KLKB1 expression. An exemplary KLKB1 nucleotide sequence from Homo Sapiens is provided below, where underlined text represents untranslated regions, regular text represents introns, and bold-faced text represents exons (Ensemble Transcript Accession No. ENST00000264690.11):

(SEQ ID NO: 379)
AGTGCCACATTAGAACAGCTTGAAGACCGTTCATTTTTAAGTGACAAGAGACTCACCTCCAAGAAGCAAT
TGTGTTTTCAGGTAGCAAATTTTTATTATTCTGATTGTTTCCAAATAAACTATAATTTTTAAGTATAATT
TTTTACTTTATGAGAAAATTAATCATTTATATTCTAATTTCCTGAGTATGTAGAGAGTATAGATAATGTT
CCTTTATGTAGAAATATTTAAATGTAAGATGATTTTAAATCAGAAAGAATATTTGATTGATTTAAAATTT
TTAAATGGGCTTTAATATTTTCAGAGGTTTTCTTTACTTAGGGATTTTTGGACTGACATTATTGCCATTA
TTTATTAATTTTGTTTTTGCCCAAATCAAGAGGTTTCATAATTGTTTACTCTCTCTCTACCAATTCCCTT
TCCAACATTACTAGCCACAGAGTTGGCCAATGAACAATAAACACAACAGTAGTCTGGAGGTCTCAATTTG
TATCTTGGGAAGCATTATAAATTTTCCAACTCCCTAGACACAAATGTACCAAAAAAAAACCCTTGTTTTC
TATACCAGTAATTGTGTGCTTTGTCTTGCAATTCAGACATTTACAAGAAAATCTAAATCACCTTAAATTA
AGATTTATGTTAAATGTGGTCTAAAACCAGCAGAGTTATGTATTGTTTTCTTTTTTAGAATGATTTTATT
CAAGCAAGCAACTTATTTCATTTCCTTGTTTGCTACAGTTTCCTGTGGTAAGTGAATTATCTATAAAACA
TGGAATTCAGGCTAAGACAGGAGTAGCCAAGCAAGTGGCACCACCCCTGGAGAAAGCTATTGAACATACA
GCTTCGGGGGTGGAGATTGTCCCTGATGATTCAGGACACGTGTCTATTTAATGTTCCACAACAAGGACCA
CTTGTCAGGTATATTGCTGTAGACATATGTTGCAGACCAGAGGAAGGAGCTCAGAAGTAGGAATGTCTTG
GGACTTGTGTTAACAAAAACTTCTGTTCGCAGATGACACTCTGCAAAGCAAAACTTGAAACAAAAAAAAA
TTAGTCCTCTATTTTTATTATCAACAGTAAAAAATTAAACTTTATCTGAAAATTCAAAAGAGTGCTAGGC
ATTTTATAGTGTCTGGGTCCAATCCAAGTATCTGTTAGGAACACCATACATAGTTTTACTCTGGACCGCT
AGGGAACCATTTCAAAAATGAAAGTAACTGGTTTAAATTTAACTTAGCAAACCATGCATTTGGATAGTTC
TAGGTGAATAGCTTTCAACACCAGATTTAGATCTCATTTCTCTATTAATTTCATTAATTTTTGGAGAATA
AAAATGATTCTGGACATTTCATTAATCATTACAGAGGGAGTTTTCTCTGTGTCCCCACAAGGCATGATTC
TGGGTCTATGGTGACTTAAGAGGGCCACACAACAATGAGTATTTAATTTTCCTCAGATGTATGGCTACAA
TAAACATCTATAGGTAAGGTTTACATTCATAAAGAGACCTTTTTTTTTCCAGGAAAAAAGACTTTTATTC
CCCCTAAATCACAACTCCCCTGTGTCTGTCCCTCAACCCTGATTTCTCTTCTAAACCGTAATTTACAAAC
CCATGTGCAAACCCACTGAAAGGTGAGAAGGAGCATAAGCCAGAGACACTGGGAACCACAGCCAACTACA
GGGGGTTTTTCATTTTTTTGTTTTGTTTTGTTTTTTGGCAAAATAAATCATGATTATGGCTAGGAAAATC
AGGGATGTAAGTAAGCAAAAATTTAGAAACTACATATTGCATGTAGTCCCCAAATTCAGAAACAGTCATC
GTTAAACATCTTTTATTTAGTCTTTCAGATATTTTTCTACATATACCTATTTGCACATTTCACAAAAAAG
AGTTATTAACTGTGGACACTCTTTGACTTGCATTTTCCACTTATAGCTATCTTTTGGTGCAAATAAGTAA
TATATTTTGGAGCTTGCTATTCTTCTCTTTTTATGGTATTTTTGTGTGCACATTCTTATGCTCTTATTCA
GTTATTTCTGTAGAATACAATTTTTGAAATAAAAATACTAGATTCAAAGGTGTGAATATTTTTGAAGGTT
TTGTGGTGTGGTATCATGAAATTAGGTTTCAGAAAGTTTACTCCATAGTTGACTTTTTCTACCAGCTAAT
AAGAGTGCTCATTTACCCCACTTAGGCCAACTCTAACAGGCTTCTGTTGCTTTGCATCCTGACATATTTA
TCTTTCTGGAAACAGTGTCCTAATTTATTTCTGCAGAGCTACTGCCTCTCAGTTTTGGTCCATGTGGTTC
TGGTGACCCTGATTCTTCTGCTGAACCAGAAAGTGCACACATCCTCCTGGCTGTGGTGACCCAATCAGAG
CCAACGTCTTGCAATGAAGCTTTTCTTTAGACATCTAGAAATAAGACTCTTATGTTTTTTTTTTCCAATT
TGACTTGAAACTTAAGACAATACACAGGCCTGAGTTGTTGGTACTATTTTGCTACTACGTGGAGCTTGAG
AGTAATGGTAACACCAAGACTGGAGCAAGTGGAAGGAGACATATTGTCCACTGATGCTATCAGTTGAGCA
CAATGTGCAGTTACTTTTTAAGCCAGATTCACCATGGGCTTTTTGGCTCCTGAACCAATAGATTTCATTT
GTTTTCAAGCCACTTTGTACTAGGTTTTCCATCATTTGCAATCAAAACCAGTATACAAACACTGGTTATT
TAATTTTTCATTTTTGCTAATCTCAGGGATAAAATGGCTTCTAGTTGTTTTAACTTGGCTATATTTGTGA
TTCTTCCCATTTTCATATACTTACTAATCACTTCTATTTCTTTTGTAAATTATCTTTTCATATTTGTTAT
CTAATTCTTTAAAATTTGAGTACTTTAATTCTCATTATTGTTTGTGGAATTGTTAAACAAGACTGAATAA
TCTGCCCAAAGTCCATGGACATGGGGGCCCATGTAAAAGCTTTGAAAGCCACCATCATTATGAGATAAAT
TATATAATAGTACTTTACATAGGCTCCAAAATACAGCACAGACACAGCTATCATTGTCATGGTCATCATT
ATCATCATGATCACCAACTTATGAGGATAAGCAAGAACACCTACTAGAAGTTTCTTTCCATTCAGCAACA
AAATTGGTGTCTTTCTAGTCACTCCCTTCCCTGACTGTCACATAGCAGTTCACAGAGGCTCAGTTGCAGA
ATGAGAAGCTCTGGGCCAGGACCTGCCATTGTATGCATCCTTGCATGGGAACTGGGGGCTGGAAGAGGAG
TGACTGCTTGATAATTATGAGTCAGTCAAAACCACCAACTGTCTGAAAAAAATAGGCCTTTTTGTAACTA
GTATTGTCACTAAACCAACTCCTCCATGTTTTGTGCATACATGAAATCTAGGCAATACACTTGTATTCCC
AAAAGCTTCCACTTGAAGAGATCTGTGCTCTTTCCAAATATAAACCTTACCCGAGAGGTGGTCATCTTGG
CCACACCTCAGAGAGGGAGAGAGGCAGTCTTGTTGGGTTGGGTGGTCATAATGGGGCTCAGGGCCAAATC
CCCAGGGGGTAGGATAGTGCAGAGAAGATGGCACTCTCCAGTGCTTAATAAAATGCACGTGGTCTAAGCT
GCCCACTCCCTCAAAGGCAATAAAAAATAGGTACTATTTAAATTGAAGAGTAACTACTGCCCCAGGGAAT
GGACAGGTTGTCATTGGAATAGCCATGGTTAATGGTCCCAGTTGACAACTGAAATGAATGTGCTACCTGA
ACAGGAAAGCTTATTAACCAGATTTCAAAGACAGTCTTTCCCGGTAAATCCAAATTTACAAATTAAAGCC
AGTAAAGACACCGAATTCTCTAATAATATGTGGGGTGCAGTATATTTTAGAGCTGGGAATAATTCCAAAC
AGCAAATAGTTCAAAATTTATTTTCAATTTAGCATATGCATGCATTTGCTTAAACTGTCTTAAAAATGAG
TAAAAAATACTGTCAGTTTGTTTCAATCATACTGAGATGAGGAACAATGTTTAGCATTGCATGCTAGAAA
AGGACACAGGATTGGGAGTCAGGGCTGGGTGACCGTCACAGGACTTTCACTAACTGTGTGGATCTTGGGC
AAGTCTGTGTGCCCTGAGACTCAGTTATTTAACTTTCTTTTAAAAAACATAGTCCAGATGCAGATAACAA
AGCCTGCCTCTAATTTCCCTTACAGAATTGTGAGAAGCTGGTGGAGATGTTTGTTACAAAAGTGTTTTGA
AAATAGAGCAAATATTATTCTTTTTAAGGCATGATGTTTTCATAGCATGTCAGGCAACAGGAAAAAACTA
AGTTAGGATTTTATTTTATTGTGGGGAATTTATGTGCAAATTATTGTGCAATTTAATGAAAATAAGCCAA
TGTTTTATACAGAAGTACCCAGAAAATTAAATAACACTATACATTGTTCAAATAGTTGCCTTAATATATT
TTATTTTCTCAGCATAATTAGAGTTGTATTATACAGGTCTTTGAGTAGTCAGTCAGTGGGAGAAGTTAAG
ACAACAGATATCTTTTTATTAAAATTATTATATGAATTATCGCAAATTAATTTTTATGGTTCTGTCACAG
GATGTCTGACTCAACTCTATGAAAACGCCTTCTTCAGAGGTGGGGATGTAGCTTCCATGTACACCCCAAA
TGCCCAATACTGCCAGATGAGGTGCACATTCCACCCAAGGTGTTTGCTATTCAGTTTTCTTCCAGCAAGT
TCAATCAATGACATGGAGAAAAGGTAAAAGTTGGTATTTCATTATTGGAGAAGCTGTTTTTCAAAACTGA
ATCAGTTTTGTGCAGAAAGGTGTAGTATAACTGAGAGTTCTTCCTCACACGGGGTTCAAGGACCAGCTTC
AGCAAAATCCCGTCAAGTGGTTCTTACAAATGCAGATTCCTAGGCCACAACCCAGATCTGCTGAACCAAA
GTTTCTTGTGACCAGGAATCTGCATTTTAAACAATCACTGTGTTTCTTTAAAGTAGTAGAAGCTAGTCAT
TTTCTATTCAAAGCCTCAAAATGCTTGAATATCATTGGGCTAAGGGATTGTCTCAAGAAAGAGTCTAACA
GGTGCACATTTCATCTGAATAAAGAAACAGATTTAACTGTGTGACCCATGATCACATTAGCGGATAGCAC
AGTCCAAAGAAAATAACATAAGACAAGCATTTTGCTGAGAATGTAATTGAGAAAGATCTAGAACTTGTGA
TTTTGGGACAGGGCAGTTCTAAATGGGGCCTATAGTGAGCCAGTTTGGGCACCTGTGGCATGATGCTATG
TATGGTGTGTGTGTGTATGTGTGCTTGTGCTTGTGTGAATATGTATTATTAACTGGAAATTTGTAAAAGT
ATTGGAAAAATAGTACTTACGATTTTGTGTGTGTGTGTGATGGAGTCTCGCTTTGTAGCCCAGGCTGGAG
TGCAGTGGCGTGATCTCGGCTCACTGCAACTTCCACCTCCCAGGTTCAAGCGATTCTCCTGCCTCAGCCT
CCCAAGTAGCTGGGATTACAGGCACGCACCACCACGTCCAGCTAATTTTTGTAGTTTTAGTAGAGACGGG
GTTTCACCACATTGGCCAGGCTGGCCTTGAACTCCTGACCTCGTGATCCACCTGCCTCTACCTCCTAATG
TGCTGGGATTACAGGCATGAGCCACCGCACCCAGCGGTAATTACAATTTTTATTAGGTCAGAGAGATGCT
TATTAATCACGAGCCACAGTTTCATCTTAATGATTTTTCCTTTTGATTAATATCCAGAGTAAGCTTTTCT
TTGTTGTTCCCATTTCCATGTTCATAACTCTTTACTCATCTTCACTCTATGTGAGTTTACCAACTAGAAA
TTGGATAGTCATTCTCTGATCCCACATGTTAAACTTGTAGAGAAAACTCAGATTGTATGTGAGGATCATC
ATATTAAAAGTGGAGGAAGGTTCTAGAATTCTTATAAATAATGAAATTAACATGAAGGTGGACATCTAAG
ACAGAGGGAAGTCTTCCATTAAGTGCAGACTACAAGGAGTTAATAAGCAAGATGAACACGATATACAAAT
CCAGCTCTTATCACTAAGTTAACTTTTTAAGTAAATGAAAGTATTTGCAAAAATAATTACCAATTGAGAA
CATAGTTGCCTGAAAGTTTAAGAACACAGGAAAAATCATTAACTCTTTAATATGGTTGATTTCCTGTACT
TAAAAAATGTGAGTGTAAAGAAAACGCAGTGATGGAGTTAGATATTATGGGGTGTTATAAAATTAGCTCT
AAGAGTGTTCTTTCCAGCAAGTATTGGGGAAGCTATATTATTTTCCTTATTCCTGGTTTTATTTGTTAGT
GTGTAGAAAATGCTAGACATTTCCTCAATGTATGTTTATTATTCTACTTCCTAAGTAAAGCTACTTTTAA
AATAGGTTTGGTTGCTTCTTGAAAGATAGTGTTACAGGAACCCTGCCAAAAGTACATCGAACAGGTGCAG
TTTCTGGACATTCCTTGAAGCAATGTGGTCATCAAATAAGTGGTAAGTTGTGAATTTCTTAGCTACATTT
GAGTTAATATTGGATCTCGCTTAGAACAGCTTTTGCTCAAAGTTTGTACTGCTACAGCTTTTTGGAAGGC
ATCACTCATAAAGATAGGAGATGGGGCAGTATTCTGGACACAAAAGAGGGACCCATATTCATCTGGACAC
TTCTATTGTCTTTATAAATCAACACATACTTAATGAGCCTCTATTATTTATGAGGTTAGCGCTCAAGTGT
AAGATTTGCAGAAAATGAATCCAAATAATTGTGTCTCGTTTCCAGATAAGAATTTTTAAGAAAACACAAG
GGAACATCTCTCTCAAGTTCACTTGAGGGTAATTTTTACATCAGTGATTCTCAACCAGCAGTGATTTTGT
CTCTTCCACTGGGGACATTTGACAATGTCTGGAGACATTTTTGGTGGCTACAACTAGGGAGGATGCTATT
AGCATTTACTAAGTAGAGGCCAGAATGTTTGAATGCTGACCAACATTCTACAAGGCACAGGGCAGTCGTC
CACAGCAAATAATTTTCTGGCCCAAAACGTCAACAGTGCTGACATCAAGAAACTCTGTGATATACCACTA
GGCCCAAATTGAAGAACTGAGTTCTGCAAATCTTGCTAAGAATAATACTTCCTAAAGGAAACTTGAGGAC
TAGGATGCTAGAGAACTTTGATTCTGACATCTGAAGCTACTGATGTCTTGGGAAACAGTTTCCAATGCTA
TCCTAATAAATTTAAGACAAATGAACTATTTCTCAAACATGACTGGGACTGATAAGAAAGTGAAAAGTGC
TGAAAAGATTCAACTGATGGGTTGTCAGAATCTTAAAATAACTGCTGTTATTCTATGTATGACTATATAT
CATTACTATTTTATTTTCATTATGCACAATTAATTTTGTAGGTTCAAATTTCAGATGTTTTTAAATTTGT
CATCCTTTCCTCCCTCATTGATATCACCTCTTCAATACGTACACACTTTGAGCCTGCTGTTTGCATTTTA
ACCAGTTATCAAAGGATGGCAATGCCTTCATTATAAATGTGGGCCTGACTTAGCCAGTATAATAGGTGTA
GTCTACGTGAGGTGGAGTACATTTCCTATTTTAAAAGATCAATTTTTATGTTAATCCAATTTGGTATAAA
TTATTCGAGTAAGTGCTATTTCTGATTGTTGTATCTTGTAGCAAAATTTAAAGAAAAAGTAATTTGTGCC
TTTCTCAATATTCCTGTTATTGTTCATGTATTCTAAAACTCACTGTTACTCACTTAGCTTGCTTTTAATG
TTTTTTAAAGTGAAAAATTGTTCCCAAGTACATAAAATCTCTACACTCAAGAACAATTCTAGTCAAAAGC
ATTTAGAGCTTCCGTATGAACACTTAAAGAGTTTTTATTTGTAAGAGTCGCATCCCAACTCTTAGCCTGT
TCTTTTCTCACATGCAGAAAAATAGGAAAGAGACTTCGTTTCCACAGTCTGCAAATTCCTGTGTTTAAGA
ACCACAGTGAATAATCCACCTCCCTGCCCAACTCATCGTACTGTCATATAGTTTTCCTGACAGTTTGTGT
ATTTTCTGTCTTTCCCACCCTTAAATTTAGTTTTATGACTTCAACCATACTTCTTAGGAGTGGAAAGGTA
TCTGTAGTAGATTATGGTTTATTCCACATAATCTTGGGGAATAAAACTTTAAAAAAGTATACAGTTTATA
CTTCTGGTTACATTACTTCCTTAACCAAAAGTCTAACCAAGAAATTTGAATCTTTAAAAAAAAAAGAGGC
CGGGCGCGGTGGCTCACGCCTGTAATCCCAGCACTTTGGGAGGCCGAGACGGGCGGATCACGAGGTCAGG
AGATCGAGACCATCCTGGCTGACACGGTGAAACCCCGTCTCTACTAAAAATACAAAAATTAGCCGGGCGT
GGTGGCGCGCGCCTGTAGTCCCAGCTACTCGGGAGGCTGAGGCAGGAGAATGGCGTGAACCCGGGAGGCG
GAGCTTGCAGTGAGTCGAGATCGCGCCACTGCGCTCCAGCCTGGGCGACAGAGCGAGACTCCGTCTCAAA
AAAAAAAAAAAAAAAAAGAGCCTAATTTTGCTTCACTGTCTGTGAAAAGAATTATCTGTATCTTTTGCAT
GTAAGACAAATCTCAATGAAAAGGGTGCTTAAATAGAAGTTAACACTATTTTAAAGCAAGAATGGAAGTG
GTTTCATCATGCGTAAACAACAACTCTCCACATTTTGTAATGATTGATCTGGATGCAATTTGTCATCAGA
CAGGAGAAGTCGAAAGCAAAGAAATAACACTGGGAGATAGAGAAGCTCTTTCATTCAATGCGAAAGGTCA
AAGGCACATCAGTTTCTTTAATAATGCAAACCTCAGCACACATTATCAGTGTCCTCATTATTATTGCCTT
GTTTATTTCCCACTGCTCATTGATAATTTCAACGTGAAATTTACCTGTATTGCTGCATGCATCTTGCAGT
TTAAGAAGTGAAGTAACCCAATTTCAAAGCTAGTGCTTTAGGGAAAATATTGGATTGTATTTACTTCAAG
CAGAGTTCGATAATTTATGTACATAATAAAAATTTTAAATCCCTTAGTTAATATAGCAGTTGCCAAAACT
GGGCTATTATCATTCTAAACTACCAACCCAAATGGTAGTGGGTATCTAATCTACCTCTAGAAAGAAAATG
GACTGTATTTGCTCTATGTATTTTTCTTGTACAGCTTGCCATCGAGACATTTATAAAGGAGTTGATATGA
GAGGAGTCAATTTTAATGTGTCTAAGGTTAGCAGTGTTGAAGAATGCCAAAAAAGGTGCACCAGTAACAT
TCGCTGCCAGTTTTTTTCATATGCCACGCAAACATTTCACAAGGCAGAGTACCGGTGAGTACAATTCAAG
GTGTGTGTTCTTTGTATTGGTGCCTCCAGGATTTCACTGTATTCTTCTTAACCTCTTTTGTTCCCAAACT
AAAAACCAAACAGGGCTTTTATTCTAACCACTTTCCTCATTTACTTACTCTATTTTATTTTTTTATCTTT
TATTTATTTATTTATTTATTGAGATGGAGTCGCGCTCTGTCGCCCAGGCTAGAGTGCAGTGGCGTAATCT
CGACTCACTACAACCTCCGCTTCCCGGGTTCAAGCGATTCTCCTGCCTCAGCCTCCCGAGTAGCTGGGAT
TACAGGCGTCCGCCACCATGCCTGGCTAATTTTTGTATTTTTAGTAGAGTCGGGGTTTTACTATGTTGGT
CAGGCTGGTCTCGAACTCCTGATCTTGTGATCCACCCACCTCAGCCTCCCAAAGCGCTGGGATTACAGGC
ATGAGCCACTGCGCCTCGCCCTTCATTTTTTAATTAAATAATTCATTTAATTTCATTTGTTTCTCTACTC
TTTTCCCCTGGCATGTAATTGTACCGCATCTTCAAAGCCTGACATCCTCTTCCCCTACTTCTCCAAAGCT
GATTCTTGCAGGTCTTTCCTCAAATACCGTCCCCTCCAAAAGCCCATTTCTGAGCATTCTCTTTTAAGTC
ACACTCAGCTCTGTTTATTTCATTCATAGAGCTAATCACAATTTGATATTAACTTGTGATTTTTTTCCTT
ATTTTTAAATCTTATTTTTATTTGCATAGATGTATGGGGTACAAGTGTAATTTTGTTACTTTGATGTATT
TTACAGTGGTAAAGTCTGGGCTTTTGGTATATCCATCACTGGAGTCATGTACATTGTACCCACTAAGCTA
TTTTTCAACGCCCGCCCCCTTCCCACCTCTCTGTCACCTTCCCAGTCTCTACTGTCTATCGCTCCATGCT
CTACTCAATTTTGGTGTCATTTTTTCCTGAAGCAAAATTTTGGTGTCATTTTTTCTGAAGTCATTTTCTG
AAGTCTGTGTCATTTTTCGCTTTCCTGAAGCGAATTTTGGTGTCATTTTTCCTGAAGTTCCGTTTGCCCC
ACACATAGGCCTTGCTTATAGAATGAGGGTTTAGTGTCACGGAGTCTCCTGCCTCATTCTCACCCTAACT
TTTCCTTTACCCCTTTGCGAGGGGAAGGATGTCCATTAGGTTAATAATGCAGACCCCTAACCCACTCATT
ATCAGGGTCATTGTTTTTCCACTGTGCATTTTAATACTAACTGTTACCTGCACTGCTCCCTGCCCCTCAA
AGTGCAGAAAGCAAAGTAACCTCTTTTCTTCCCATTCAGGAACAATTGCCTATTAAAGTACAGTCCCGGA
GGAACACCTACCGCTATAAAGGTGCTGAGTAACGTGGAATCTGGATTCTCACTGAAGCCCTGTGCCCTTT
CAGAAATTGGTAATTGTAGGACTACTTCACTTTGTGATTGTGGTAGGTGGAATAGGAGCCCCCAGAGACG
TCCCTGTGCTGAGCCCTGGGACCTGTGCGTGTGTTCCCATAGCTGGCAAAAGCGTTTCTGTCAATGGCAT
GCAGTTACGGGCTTCGAGATGGGGAGTTTACTCTGGATTTTCTGAATGGGCCCAATGTACTCACAGGGTT
GAGTGCTCACAAGGCTCATAAGAAAAAGAGAGAGGCGGAAGGCTCAGAGCCAGAGAGAGAGGTTTGAAGG
TATTACACTGCTGGCTTTGAAGATGAAGGTCCGTGAGCCAAGGAATGCAGGCGGCCTCTAGAAGTTGAAA
AGGGCGAGGAAAGAGTTTCCCTGTGGAGCGTCCTGGAGGAAGAAGCCCTGCTGATGTCTTGATTTTAGCC
CAGTAAGACCCAATCTCTAGAACAGTAAGATAATTAATTTGTGTTGTTTTTAACCACTAAGTTTGTGGTT
ATGCCCCTAGAGCAGCAGTTATAGGAAACTAGTACAGTGATACTGTTAGAGTTATAGGACAGTGATATAG
GACAGTGATACTGTTATAGTTATAGGAAACTAGTACAGTGATACTGTTAGAGTTATAGGACAGTGATATA
GGACAGTGATATTGTTATAGTTATAGGAAACTAGTACAGTGATACTGTTAGAGTTATAGGTACAGTGATA
TTGTTATAGTTATAGGAAACTAGTACAGTGATACTGTTACAGGTACAGTGATATAGGACAGTGATACTGT
TATAGGAAACTAGTACAGTGATACTGTTAGAGTTATAGGTACAGTGACATAGGACAGTGATACTGTTATA
GTTATAGGAAACTAGTACAGTGATACTGTTAGAGTTATAGGTAGAGTGATATAGGACAGTGATACTGTTA
TAGTTATAGAAAACTAGTACAGTGATACTGTTATAGTTATAGGACAGTGATATAGGACAGTGATATTGTT
ATAGTTATAGGAAACTAGTACAGTGATACTGTTAGAGTTATAGGTACAGTGATATAGGACAGTGATATTG
TTATAGTTATAGGAAACTAGTACAGTGATACTGTTAGAGTTATAGGTACAGTGATATTGTTATAGTTATA
GGAAACTAGTACAGTGATACTGTTATAGGTACAGTGATATAGGACAGTGATACTGTTATAGGAAACTAGT
ACAGTGATACTGTTAGAGTTATAGGTACAGTGACATAGGACAGTGATACTGTTATAGTTATAGGAAACTA
GTACAGTGATACTGTTAGAGTTATAGGTACAGTGATATAGGACAGTGATACTGTTATAGTTATAGGAAAC
TAGTACAGTGATACTGTTATAGTTATAGGACAGTGATATTGTTATAGTTATAGGAAACTAGTACAGTGAT
ACTGTTAGAGTTATAGGTACAGTGATATAGGACAGTGATATTGTTATAGTTATAGGAAACTAGTACAGTG
ATACTGTTATAGTTATAGGACAGTGATATAGGACAGTGATATTGTTATAGTTATAGGAAACTAGTACGGT
GATACTGTTATAGTTATAGGTACAGTGATATTGTTATAGTTATAGGAAACTAGTACAGTGATACTGTTAG
AGTTATAGGTACAGTGATATAGGACAGTGATATTGTTATAGTTATAGGAAACTAGTACAGTGATACTGTT
ATAGTTGTAGGACAGTGATATTGTTATAGTTATAGGAAACTAGTACAGTGATACTGTTAGAGTTATAGGT
ACAGTGATATAGGACAGTGATACTGTTATAGTTATAGGACAGTGATATTCTTATAGTTACCGTGGTATAG
TTATAGTTAAAGGTACAGTGATATTGTTATAGTTATAGGACAGTGATATTGTTATAGTTATAGGACAGTG
ATGTAGTTACAGTGATATAGGTACAGTGATATTGTTATAGTTATAGGACAGTGATATAGTTATAGGACAG
TGATATTGTTACAGTTATAGGTACAGTGACGTTGTAATAGTTATAGGACAGTGATATTGTTATAGTTATA
GGTACAGTGATGTTGTAGCAAAACTGTAAGGTCATTCCTTGGTTGTGTCCCTATCTAGTGAAATGACTCT
ACCAGGGGTAGGGAAATAAAACTCTGTCGTTTCACACATAAAGGTAATTTCAATGGAATTATCCAGAAAA
TTGCCATGACATTCCACCTCATTTAGCATGTCAGGATGTTAATGACAAGATGTTACTAAAAGCAAATCCC
TTACGGCCAGTTTTCCGCAGTACTGGGTGCTGGCTCTGTGCCTGGCCCTGTATTGGGTGCTGGGCTAGGA
TTTCCCTGTGGAAGATTGGGAAGGTTGGTTACAAGGTGGCTATTTTCCTGTCTCCTCTTTGCGACAGCAC
ACCTTCTCCATGGTGTGTGCCAGGTTCACGTGTACTGGTGATTTAATTTTAACGTTCATATTATTTTTTT
CTGGGAGAGTTTTTGAAGGCTGCCAGGAGGCAGGACTCGATGCAAACATGCTCCATTCTGTACCCAGCCC
TGTTGCTGGAAGGATTTGCTGCACTTACCCAGGGAACAGGCAAGCTCGTGCTGTGGCTCTGGGCTGTCAC
AGCTGCTGTCCACACCTGGGAGAGCACCCTGGATGGCTCATCTGTGTACTTGCTTTCTTGTTAAATTGCA
GTGAGTTCACATGTGATTTAATCGGATCAAATGGCCTTTACAGACTGATAAAAATATGGCTGTTTCAGGT
GGTGTTTTGAGCTGCTAAGGGCGTGGCTTTTCACTGAGTACGTGGTCCCCGTTCCTCAGGGAACACCCAG
TAGCCACATGCCTCCTAAACCTAGAGTAGGGCTGTCTCCTGGCCTAACTGCCCAAATGAGATTCATAAGT
TAGGGATGATCTGTAGTTATCACTACAGATTTGTCCTTGGTTTCACCAAGGATTTTCCTAATTTTACAAA
CAAAACCCCTAAGGCTCCTGGAAGGAGGGTAGAAGTGAAGGTGCTCCGGGGGCAACACAGCTGATGAGCT
GAACCAGAACTCGACCCTTGGGTCACACACATTTCACAGTGCTCACTCCACCTTTTGTTTTTTTAATGGA
TTTAATGGTGTTTTAAAGCCTCCTGCCTCTCAACACATATGAATTCATTATATTTACAGATTTCCTTCTC
TTGTGGTCCATCTTCCTGCATAGATCTTGAGAGATGTCAGGCTAACCACGTTTCCTCAGTTAATTTAACA
AAACCATTTGCAACTCTGACATGGAAAATTCCTACCATGTGACTTATTAATTTATCAATTGAGATGGTAC
ACATATTTTCAAGCCAAAAGGAGGAAAACATAAATTGGAAAAAAAAGGTTTTTTTATTTTTATCACCTCT
GGGGAAGAAAGTCTGATAAACGAAGCTGGTTGATAAAATTGCAATTAGGGGAAGCAACATCATGGTTTCT
GTTCGGAGGCTAACCAGATGGCATACTTGAAATAGAGAATGTCCTAGAAATCAACTGGTTGCTTGGCCAA
AATATCTATAAATAGTGCCCAACATATTAGATAGGAAAAGCAAAGTAAAAACAATTTTAACAGGTTAGGA
CATTGGGCTGAAGTATTGCATATATTTAATGTCATGTGCGTCCGTGTGAAGAGACCACTAAACAGGCTTT
GTGTGAGCAAGAAAGCTTTTTAATCACCTGGGTGCAGGCAGGCTGAGTCCGAAAAGAGAGTCAGTGAAGG
GAGATGGGGTGGGGACGTTTTATAGGATTTGGGTAGGTAGTGGAAAATTACAGTCAAAGGGGGTTGTTCT
CTGGCGGGCAGCGGTGGGGGGTCACAAGGTGCTCAGTGGGGGAGCTTCTGAGCCAGGAGAAGGAATTTCA
CAAGGTAACGTCATCAGTTAAGGCAGGAACCGGCCATTTTCACTTCTTTTGTCTTTCTTCAGTTACTTCA
GGTCATCTAGATGTATACGTGCAGGCCTGGGCCCAGAGGCCTGACATTCCTGTCTTCTTATATTAATAAG
AAAAAGAAAACGAAATAGTGGTAAAGTGTTGGGGTGGCGAAAGTTTTTGGGGGTGGTATGGAGAGATAAT
GGGCGATGTTTCTCAGGGCTGCTTCGAGCGGGATTAGGGGCGGCGTGGGAACCTACAGTGGGAGAGATGA
AGCTGAAGGAATATTTTATGGTAAGGGGTGATATTGTGGGGTTGTTAGAAGCAGCATTTGTCATATAGAA
TGATTGGTGATGGCCTGGATATGGTTTTGTGTGAAATGAGAAACTAAATGGAAGACACAAGGTCTGAATA
AGAGAAGGAGAAAAACAGGTGTTAAAGGACTAAGAATTGGGAGGACCCAGGACATCTAATTAGAGAGTGC
CTAAGGGGGTTCAGTGTAATTACTTGCTTGGTTGGTGAGTTTTTGGGCTCTATCCTTGACAGAGTCCTCC
TTTTTAAGTTGGAGGCTGAGCTTGGTGAGGTGTGTTTTTAAAAGACCATTAGTCTGTTCTACCTTTCCTG
AAGATTGAGGATGGTGAGGGGTATGAAGGTTTTACTGAATACCAAGAGCCTGAGAAACTGCTTGGGTGAT
TTGACTAATAAAGGCCGGTCTGTTATCGGATTGTATAGAGATGGAAAGGCCAAACTGAGGAATTATGTCT
GACAGAAGGGAAGAAATGACCACGGTGGCCTTCTCAGACCCTGTGGGAAAGGCCTCTACCCATCCAGTGA
AAGTGTCTACCCAGACCAAGAGGTATTTTAGTTTCCTGACTCCGGGTATGTGAGTAAAGTCAATCTGCCA
GTCCTGGGCGGGGGCAAATCCCCGAGCTTGATGTGTAGGGAAGGGAGGGGGCCTGAGCAATCCCTGAGGA
GGAGTGGAGTAGCAGATGGAACACTGAGCAGTTATTTTTTGAGGATAGATTTTTACGACGGAAAGGAAAA
GTGAGGTTTTAAGAGGTGGGTTAGTGGCTTGTAACTTACATGGAAGAGTTTATGAAATGATGACAGAATA
GAATGGGCCTGTGAGGCTGGAGGAGATATTTTCCTTGGTCCAAGAATTATTTGCCTTGTGTGGGAAGAGA
TTGATAGGTGGAAGTTTCAATGGGGGAGTAGATGGGAGTGACAGATGAGGAAGAAAAAAACTGGCTGTGA
GGGATAGAAGTTGGAATGCTCGCTGCTTTTTTAGCTACCTTATCAGCATAGGCATTGTCCTGAGCAGTGG
GATCTGATGCCTTTTGGTGGCCCTTGCAGTGAATGGCTTCAGCTTCCTTTGGAAGTAAAGTGGCCTTGAG
AGGAGTTTTTATTAAAGAGGCATTAAGATGGAGAACCCTTGTGTAGTGAGGAAACCTCCTTCAGCCCATA
TAACCGCATGGTGGTGCAGAATATGGAAGGCATATTTAGAGTCAGTATAAATATTGACACGTAGTCCCTT
TGCAAGAGTGAGGGCCTGAGTTAAGGCAATGAGTTCAGCTTGCTGAGAGGTAGTGGAGCGGGGCAGAGCA
GTAGCCTCAGTGATAGATGTGGAAGATACTACAGCATAGCCTGCCTTTGCTGGTGAGTGGTGATTAGGCC
TGGTGGAACTGCCATCAATAAACCAAGTGTGATCAGGGTAAGGAACAGGAAAGAAGGAAATATGGGGAAA
TGGAGTGGATGTCAGGTGGATCAGAGAGATACAGTCATGGGGGTGGGGGCCAGCCTAAAACAGTAAGGTC
AAGTTGTTTGAACAGAAAGGCTACAGGGCGTGGTCCTGGCTCTTGTGTAAGAATTTTGACTGCGCAGCCC
TGCACTTCGGCTGTGTGTAATGAAAAGGGTTGGGATGAGTTAGGGAGAGCTAGTGTGGGAGCAGTTTCTA
GGGCTGTTTTTAAGGAATGGCAAGAGGAGTGGCTAAAGGATTTAGGATCTTTGGGGTCAGCTAGCTTTGC
TTTTGTGAGTTTATATAATGGTTTAGTCAGGATGGTAAAACTTAGTATCCAAAGGCGGAAGTACTTAACC
ATACCTAGGAAGAAAAGGAGTTGTTTTGTAGAAGGGGTTGGGGTTTGGGAGATGAGCCAGACACAATCAG
CAGGGAGAGCACATGTGTTTTCATGAAGAATTATGCCGAGATAGGTAATGGATGAGGAAGAAATTTGGGC
TTGACTGAAGTAATGGGGGCTGTCCTCGAAGCCTTGTGGCAGTACAGCCCAAGTAAGTTGCTGAGGCTGA
CGGGTGTCAGGGTCAGTCCAAGTGAAAGCGAAGAGAGGCTGGGATGAAGGGTGCAAAGGAATAGTAAAGA
AAGCATGTTTGAGATCCAGAACAGAATAATGGGTTGTGGAGGGAGGTATTGAGGATAGGAGAGTATATGG
CTTTGGTACCATGGGGTGAATAGGCAAGACAATTTGGTTAATGAGGCACAGATCCTGAACTAACCTGTAA
GGCTTGTCCGGTTTTTGGACAGGTAAAATGGGGGAATTGTAAGGAGAGTTTATAGGCTTCAAAAGGCCAC
GCTGTAACAGGTGAGTGATAACAGGCTTTAATCCTTTTAAAGCATGCTGTGGGATGGGATATTGGCATTG
AGCGGGGTAAGTGTGATTAGGTTTTAATGGGATGGTAAGGGGTGCACGATAGGTTGCCAAGGAGGGAGCA
GAGGTGTCCTATACTTGTGGATTAAGGTGGGGACACACAAGGGGAGGATGTGAAGGAGGCTTTGAACTGG
GGAAAGGGTGGCATTGAGGTGTGGCTGTGGCCTAAGAACAGTCAGGGAAGCGGATAATTGAGTTAAAATG
CCTCGACCTAGTAAGGGAGCTGGGCAGGTGGTGATAACTAAAAAGGAGTGCATAAAAGAATGTTGTCCAA
GTTGGCACCAGAGTTGGGGAGTTTTAAGAGGTTTAGAAGCCTGGCGGTCAATACCTACAACAGTTATGGA
GGCAAGGGAAACAGGCCCTTGAAAAGAACGTAATGTGGAGTGGGTAGCCTCTGTATTAATTAAGAAGGGG
ATGGATTTACCCTCCACTGTAAGAGTTACCTAAAGCATCTGTGATGGTCCAGGAGGCTTCTAAGGTGATC
GGGCAGCGTCAGTCTTCAGCCGCTAAGCCAAGAAGATCTGGGAAGCAGTCAGTCAGAGAGCCTTGGGCCA
GAGTTCCAGGGGCTCTGGGAGTGGCAGCCAGGCCAGTTAGACAGTCCGATTTCTAGTGGGGTCCCACACA
GATGAGACACAGCTTAGGAGGAATCCCAGGCTGCGGGCATTCCTTGGCCCATTGGCCAGATTTCTGGCAC
TTGAAACAAGATCCTGATGGAGGAGGTCCTGTAGGAATGCTTGACCACTGCAGTTTAGGCATTTTGAAGT
TTTTGTGTGTGCTGGAGATGTGGCTGGGTTTTGTCTCACAGCAGAGGCAAGGAATCGCAACTCAGAAATA
CATTGCTACTTGGCTGCCTCTATTATTGTACATCTTGAAGGCGAGGTTAATTAAGTCCTCTTGTGGGGTT
TGAGGGCTGGAATCTAATTTTTGGAGTTTTTTTTTGTTTGTTTTTTGGTTTTTTTTTTTTAATGTCAGGA
GCTGACTGGGTGATAAAATGCATATTGAGAATAAGAGGCCTTCTGACCCTTCTGGGTCTAGGGCTGTAAA
GCGTCTCAGGGTTGCTGCCAAACGGGCCATGAACTGGGCTGGGTTTTTCATATTTGATGAAAAAGAGCCT
AAACGCTAACTGATTTGGGAGAGGTCGGATAAATAAAAAGGAACATTAATCTTGACTATGCCTTTAGCTC
CAACCACCTCTTTAAGAGGAAATTGTTGGGCAGGTGGGGGAGGGCTAGTCGTGGAATGAAACTGTAAGCT
GGACCGGGTGTGAGGAGGGGAGGTGATAGAAGGATTATAGGGTGGAGGAGCAGAGGCTGAGGAAGAATTG
GGATCTGGCTTGGCCTGGCAAGGAGCAGCCTGGGGAGGAGGGGAGAGGTCAGATGGGTCCATAGAAAAGG
AGGATTGGAAAGACTCAGCAACACTTGGGGTTGGGATTGAGAGGACAGATGGGTTGGGATTGAGGGGACA
GATGGGAGGGAAAGAAGGAAGATTTGGGACAAGTTGCATTGGGAACAGAGACTAGGGAGGGACCAATGTG
TAAAAGAATGCCTGGACGTCAGGCACCTCAGACCGTTTGCCCATTTTATGACAAGAATTATCTAGATCTT
GTAGGATGGAAAAATCGAAAGTGCCGTTTTCTGGCTATTTGGAACCATTGTCGAGTTTGTATTGGGGTTA
AGCAGCATTGCAGAAGAAAATAAGGCATTTAGGTTTTAGGTCAGGTGTGAGTTGAAGAGGTTTTAAGTTC
TTGAGAACATAGGCTAAGGGAGAAGAAGGAGGAATGGAGGGTGGAAAGTTGCCTATAGTGAAGGAGGCAA
GCCCAGAGAAAAGAGAGGGTAGAGACATGGAGAGAAGGGGTGGGGGGGTGCTTGCCCCCAGGAAAGTGGT
TCTTGCCACTAAGGGTGAAGGATCAAGGCAGGCATTCGCGCGGTGATCAGATACCTCTGAAACGTGGGTG
AATAATCAAGCAGGTGTCCCTGCAGTGATTAAACAGCAAGGAAAGACTATCTTCCCAAGTCCATGACCAG
TGCCAGAGTTTTGGGTTCATGGATAAAACGCGTCTCCTCTGTCTCTACCAGAAAATGAAAGGAATTGAAA
TTAAGAGAAGGGAGAGATTGAAGGATGGCGCCAAGATTGAAAGGAAAAAGAGGTTGAGGGATAGGGAGAG
AGGTTGGATAAGAGAGTAAAAAGAGGCTGCTTACCCAATTTAAAATCGGTGAGATGTTCCTTGGGCTTGT
TGGTCTGAGGACCAGAGGTCATGGGTGGATCTTTCTCATGGAGCAAAGAGCAGGGGGACAGGGGATTGAT
TTCCCAAGGGAGGTCCCCTGATCTGAGTCACAGCACCAAATATCACGTGTGTCCATGCGAAGAGACCACC
AAACAGGCTTTGTGTGAGCAAGAAAGCTTTTTAATCACCTGGGTGCAGGCGGGCTGAGTCCAAAAAGAGA
GTCAGTGAAGGGAGATAGGGGTGGGGACGTTTTATAGGATTTGGGTAGGTAGTGGAAAATTACAGTCAAA
GGGGGTTGTTCTCTGGCGGGCAGGGGTGGGGGGTCACAAGGTGCTCAGTGGGGGAGCTTCTGAGCCAGGA
GAAGGAATTTCACAAGGTAACGTCATCAGTTAAGGCAGGAACCGGCCATTTTCACTTCTTTTGTCATTCT
TCAGTTACTTCAGGCCATCTGGATGTATGCATGTAGGCTTGGGCCCAGAGGCCTGACATTTAACATGGAT
AAATGTAAAGTTCTTAGAATCATACATACACTTTGGAAAAGATGGGGCTTAATCGCACTTTATAAGACTT
GAAGGATGTTTGAGAATCACTATGAAACTGCTGAAAATACCAAGAAAATTTAATTCTTATGTATATAAAT
AATGTGTCTGTTTTACATGAATCCCTTCTACAAGCTTGGTATTTAATATGGCATATATTGTTTTTTCATA
GTAGATTTAAAATTTTTGATATCTAATTTAGATAACATAAAATTAACCCTTTGAAAGTGTACAACTCCGT
GGTTTTTAGTATATCCACCTGATTGCACAACGATCACCACTGTCTAGTTCCAGAACATTTTTATCACCAC
AAAAGAAAGGCTGTATCCAGGCCGGGCACGGTGGCTCACGCCTGTAATCCCAGCACTTTGGGAGGCCGAG
GCGGGCGGATCACGGGGTCAGGAGATTGAAACCATCCTGGGTAACACGGTGAAGCCCTATCTGTACTAAA
GATACAAAAAAATTAGCTGGGCATGATGGCAGATGCCTGTAGTCCCAGCTACTCAGGAGGCTGAGGCAGG
AGAATGGCCTGAACCCAGGAAGCGGAGCTTGCAGTGAGCCAAGATTGCGCCACTGCACTCCAGCCTGGGC
GACAGAGCAAGACTCCATCTCACAAAAAAATAATAAAAATAAAATAAAAAAAAAAAAGAAAGGCTGTCTT
TCTCCTTTCCCATTGGCCGTCTTTCTCCATTCCCTACTCCTCCAATCCCCTGGCAACCACTAAATCTACT
TTCCATGTCTGTGGACTTGACTCTTCGGGACATTTTACATAAATGGAATCATGCAATGCAGCACATTTTG
CATCTGGCTTTTTTCACCTGGCGTGTTTTCAAGGCTCATTCGTATTCTAGCATATATCAATACTTTGTTC
CTATTTAGGACTAAATAAGATTCTATTGTATGAATAAAACATATTTTGTTTATATACTTAGTTTGATGAA
CATTTGAGTTGTTTCTGGATTTTTTTTTTTTTTTTTTTGCCTCTTATGAATAATGCTGCTATGGACAACA
GTTTTTGGGTAGGCATGCATTTTAAATTCTCTTATGTATATACTTAGGATTAAAATTGCTGGATCACAGA
GTAACTCCATGTTTAACTTTTTGATGAATTGCCAAACTGTTTTTGAGAGCAGCTACACAATGTTACATTC
TTACCAGCAACAATTGAGGGCTTCAGTCTCTCTACAACCTTAACAACACTTGTTATTGTCTTTGTAATTA
TTGCCTTTCTAGGCAGTGTGAAGTGGTGTCTCACTGTGGTTTTGATATGCATTTCCCTAATGACTAACAA
TGTTGTGTATCTTTTCGTGTGCTCATTTTCAATTTGAATACATTCTTTGGGAAAATCTCTGTTTAAATCT
TTTGGCCATTAAAAATAATTGGGTTATTTTCATTGTTGAGTTGTATGAACTCTTTATATACTCTGGATAC
TACACTCTTATGACATATATTATTTTCAAAAATTTTCTGTGCATCTGCAGGTCATCTTTTCACTTTACTG
ATGGTGTTCTTTGAAGCACCAAAGTTTTTAAACTTGATGAAATCCAGTCTGGCTTTATTCTTGCACGTGC
TTTACCTAAAACGCCAAAACCTAATTCATGGTTTTGAAGATTTTTGCTTATGATTTGTTCTTAGAGGTTT
ATAGTTTTAGCTCTTACATTTAGGCATTTGATGCATTTTAAATTAAATTTTGTATATGGTGTAAAGTAGC
AATCCAACTTAATTCTTGCATGTGGGTATTCAGTTATTCCATTGTCTTGAAACCCTTTTCAAAATCAATT
GTCTATAAATGTAAGAGTTTATTTTTGGACCATCAGTTCTATCCTGTTGACCTATATATGCCTATCCTAA
TGCCAGTTACACACAGTCTTGATTACCATAACTTTGCAGTAAGTTTTGAACTCAGACAGTCTGAGTGCTT
TTATTTTGTCCTTTTTCAAGATTAATTTGGTTATTCCGGATCTTTTGCATTTCCATATGAATTTTAGGAT
GGTTGTCAATTTCTGCAATAGAAAAGCAGCAGGATTTTGATAGAGAGTGCATTGAATCTGTAGACCAATG
AGTATCAATGGAATTATGTGTTATCAAATTTAGTAAACTACATAAACGATATGTACACAACTAAAACAAA
ACTAAGATATAAGATCATATTAATGTAATGATAATAAAAGTGGATTGTCTCCTGTTCTAATTTTAATAGG
CACAAGGCATTTTTGTTAATCACTTCTTATTAAAGAATTTTTTATAATATTCAGGAAAATACAACAAAAA
AACCCTTACATTCCTAAGGCCTCAGAGTCAGAGTAATATAAAGGAAATGTAAACACATGCTGAGTAATGC
AAGCATTTGGCAATGGTGGTGACTGGAGCTGGGAGCACAGCTTTTATTTCTCTGAAATAGGAATTTGCCC
CTTAGAGTTAGACCAATTTTGCCTTCCTCTAAATGGCAAACAGTTTGGAGATACTTTAAAGGACATTTTT
TCACTTAGGATGTTTAGTACTATGAATAATAAATAGTCACAATTTCCTTAACTATGGTGACAAAATACAA
GCAAATTTAGCCTCATGTCATTTCCTAAGGAACATCTTCTCTCTGTGAGTTCACAGGTTGCCACATGAAC
ATCTTCCAGCATCTTGCGTTCTCAGATGTGGATGTTGCCAGGGTTCTCACTCCAGATGCTTTTGTGTGTC
GGACCATCTGCACCTATCACCCCAACTGCCTCTTCTTTACATTCTATACAAATGTATGGAAAATCGAGTC
ACAAAGGCGAGTATGCATGGAAAATCGCATCACAAAGGCGAGTATGCATGGGGAGCACTTGCTGCTGTAC
TTTCATCACTTTTATAGTCTGAGTTCTTAAAAGTTTCGTTCATTTCCCTCAAAACACTTGAACCTGCAGT
TTCAGTAGGTACTGTTCTGCCAGGTGCAGATTAGTTAAGAGATTAGCAGACTTCTCTGCCTATCTTCTCT
TACTTTAAAACAAATGTTACCATTGAATCAAGGAAGCAATAGCCATGAGAAAAAAGAAGGATCTGACGCC
TTTGAATGAAGATTCAAAACATGATCTTCATGTTTTGTATTAGCTTGGAGTAAAATCCACTTGCTGGCAA
TATAGCCCTTAAGCTTGTTGCCTCTTCTCTTTGTTTCAGAAACTAGAGCCCTGTTTATTCTGATCAAGGC
TCTGGCCCACTGTCTTTATCTCAGATAACCCACCCTCTTCTGCACACAGCATGGAGCTAAGAGAAGGGTG
TCTAGTTATGTAATATCATCGGCAGCATAAATTCCCAGAATTTGTTCTTTGATTTTTTTGTTTGTTTTTC
CAGTTAGAAGGTGGAACTTCATCATTGTCCTCTTTTCAGGTTGTCTGTGCCTATTAGTTTTCTCCAGAGG
GAGAGGTGGCTTGATTTACATTTAATCTCTGCAATTTATTAGAGTCCTGTAGTTGGATTTACTTTGAAGA
GAGTTTCCCAGAAGAATAAAATTTGCTGCGTTGCTTTTTGGGTGTGAGCTGCTTTTGTATTTGCCTAATG
CCTTTAATGCAAATTTCTTTCTTTCTCTCTTGCTTTTTTTTAAAAAAAATAGAAATGTTTGTCTTCTTAA
AACATCTGAAAGTGGCACACCAAGTTCCTCTACTCCTCAAGAAAACACCATATCTGGATATAGCCTTTTA
ACCTGCAAAAGAACTTTACCTGGTAATGTGATTTGATAATAATATTACATAAAATGTAACCTATTTCATG
ACTTTTAACAGCAACAGTGATGAAACAATCCTCAAGGTAACAGAAACTTGTGTAAATGTCGTTCATTGCT
TTTCCCATCTGATATCTTTTTGTGTTTATAATTGACACAGAACCCTGCCATTCTAAAATTTACCCGGGAG
TTGACTTTGGAGGAGAAGAATTGAATGTGACTTTTGTTAAAGGAGTGAATGTTTGCCAAGAGACTTGCAC
AAAGATGATTCGCTGTCAGTTTTTCACTTATTCTTTACTCCCAGAAGACTGTAAGGAAGAGAAGTAAAGG
AAATTTTATTTTTCAAAGACAGTTGACATGACCATTTCATATTCTCTTTCCCCCTGTGAAGGCTTACTCT
TTCTACTGTTCATTTCATCTAGGTGTAAGTGTTTCTTAAGATTATCTATGGATGGTTCTCCAACTAGGAT
TGCGTATGGGACACAAGGGAGCTCTGGTTACTCTTTGAGATTGTGTAACACTGGGGACAACTCTGGTGAG
TAACCTCACTTTTTCGTGGACCTGTCAGGGATGTCTGTCATGTTGATAGTTTGCTTAGTCTTAAGGAATT
ATGTGTCTTGTTCTCCTTGGTTAGAAGGGACTTTGATTCACTTCTAATTCCAACCATTAGCGTCAACGCT
CTCTTTTCAGTCTGCACAACAAAAACAAGCACACGCATTGTTGGAGGAACAAACTCTTCTTGGGGAGAGT
GGCCCTGGCAGGTGAGCCTGCAGGTGAAGCTGACAGCTCAGAGGCACCTGTGTGGAGGGTCACTCATAGG
ACACCAGTGGGTCCTCACTGCTGCCCACTGCTTTGATGGGTAAGTGTTGGATGCATCTCATCCAGAGTCT
TATCTTGGCTTTTCATTTTGAAGGATCTATGATCAGCTGCTTCACCGCCATGTGACTTTATGAATAGAGA
CGTGTTAAAGCGGGGATGGTATTCACAACATTTAACTTATAGGGTCCAAGCACTGACCAACCTGACCATT
AGAACAGAGTGTGGTCTCTGTACAGGGCAGATGGCGCTGAGTGGGTATTCTCCACAGAAAGAGAAACGAA
GACAGTACCCCACTCCTCCAACCCACCACCCACCACCAATCCCACCACCAATTCCACCACCAATCCTGCC
ACCCACCACCAATCTCACCACCAATCCCACCACCAATCCTACCACCCACCATCAATCTCAGCACCAATCC
CACCACCAATCCCACCACCAATCCCACCACCTACCCCACCACCAATCCCGCCACCCACGACCAATCCCAC
CACCGATCCCGCCACCAATCCCACCACCAATCCCACCACCTACCCCACCACCAATCCCGCCACCCACGAC
CAATCCCACCACCGATCCCGCCACCAACCACCAATCCCACCACCAATCCCACCACCAATCCCTGATGTGT
TCTTCAAAGACTTATTTGTCAGGCCCATAGAAATGTTACTTCTTGCTCTTTGATTCATAAATATACTAAG
TCATAATAATTTTTAAAAGTGAGAGTTTCGTACTCTGTATATTTCAATGTATATAATTTGATCTATTTCA
ATTTATTGGTCAAATAGTAGACATGTTAGGTAAGTCTTAAAATACTGAGGCTTTGGAGTTAGACAGAACA
TGGCTTAAGTGACAGCTTTGCTGCTTATTAGAGGTGTGGCCCTAGAAGATTTGTAAATCCCTCTGAGCTT
TATTTGATCTAAAATATGAATAGTAATAGTCCCGAATTTGTAACGTTGTTGGGAAGATTAAGTGACACAT
TTAAAATGCTTAGTACTGTGTGTAGAACATAAACACTTCAAAAAATGTAAACTGTGATTTCTATATTCAA
TAAGAAATGTAGAAATGGACAAAGCATATAAAAAGCAAAAGAAATACTAGAAGACACTTGATTTTTCTCA
AAAATAAACACACCAAGTATTTTTGTTTTAGTGAAATTCATGCTTACATGCTGTATACTAGGATTGAACA
TACTGCCACCAAAATATAGCAGTCGGTGGTACATGTGGGTGGAGCAAGACCCCTCCACCTTGTCATCGTG
TGAAGGGGCTCTGCCATACATGACCTTGCATGTGACTTTAAGGTGGTTGGCCTGGAAGAAAAGTCCCAAG
ATGGGAAATAGTAGGTGTCTTTTTTACTAAATGCACTCCAATTTGGGACCAAAAATTTTCATTCTTGAAG
GCTCAGTATTGTGAGTTTATAAGAGATAATAGACATAAAAGTGTAATGATTTCATTGCAAATAAAAAAAG
GCCCCTTTGCACCTGATATCTCCATCATTTTTCTAGAATTTTGTGCACACATGCCTTGCACTACTTGGTG
ATGATAAAGATTTCCAGATCTTTGCACAGAATAAGGCTTTGCTTTAGATCAGAATTTTGGATGTACTTAG
TATACATTCATCTTTTAAATAATCTATTTACATTTTCATACTTTCCAAAATACAGATATATTTTATTTTA
TTTATATATTTATTTAATTTATTTTTTGAGATGGAGTCTCTCTCTGTTGCCCAGAGTAGAGTGCAGTGGC
ACAATCTTGGTTCACTGCAGCCTCTGCCTCCCGGGTTCAAGCGATTCTCCTGCCTCAGCCTCCTGAGTAG
CTGGGATTACAGGCGCGCGCCACACCTGGCTAATTTTTGTATTTTTAGTAGAGACGAGGTTTCATCATGT
TGGTCAGGCTGGTCTCGAACTCCTGGCCTCAAGGGATCCACCCACCTCGGCCTCCCGAAGTGCTGGGATT
ACAGGTGTGGGCCACTGTGCCCAGCTGTATAGAGATATTTTAAACAACACTAAAGTCCTCCTACTTTGAC
TAATTAGAAGAGCATTAGAAGATCAGCCTGACTTCTTGACAGTTCTGAATTTAGTGGAGCAATGAGGTTC
AGCTTTGGTGAATGAGCTTAATTTTTCCATGATAAACTGCTAGTTTCTTCCCACTACAGTGTCTCTCAAA
AATGGGACAGCAACATTCTTTTTGTTTTCACTTGCAGTAAGCATGATGCAATTACATAAATGTACACTTT
TCAATTTGTTAAATAGAATCTTCAGAGATTCACTACTGCCGCTATTGGTGATGAAAAATTACCAGAAGGA
GGAATTAGGTAGGAGAAAATGTGTCCTATGTATTTCCTTCCCAGTTCTTTGAAAGAGAGTGATAGGAAAA
AGGAACACTATTGAAGGAAGGACTGCCCAGTTTCAAACAGGTATTTATTTTTCTCTCCTAGGCTTCCCCT
GCAGGATGTTTGGCGCATCTATAGTGGCATTTTAAATCTGTCAGACATTACAAAAGATACACCTTTCTCA
CAAATAAAAGAGATTATTATTCACCAAAACTATAAAGTCTCAGAAGGGAATCATGATATCGCCTTGATAA
AACTCCAGGCTCCTTTGAATTACACTGGTATGTAGCATATGTAAGAAGGTGGAGAGCAGAATTGCGCTGG
TTGATATTTTCATATCAGTTTGAACAAGAGGGCAGACCTAGAGAGACTGTCGTCGTTTTCTGACTGGTGG
AGTTGAGGGAAACGTGAGGGTTGCTGGGAAGTGAAGACCCCGCGACTTGCCGTGAAATCTCTTCTACTTA
AAGAGCAAGACATGTGAATTAATTCTTTCAGGGAGGGATACAACTGCATGCAGGTGATGGAAATAATGGG
CGTGGGAAATGTCTGTGCCGTCTGAGAGGCACTGGGCTTGCTTTGACAAGAGTAGCAGAACTGTCATTGC
TTTGGGCTTAGGGATATTCGAATGTGTGAGGGCAAGTGGGATCAGATATCTACTTCCAGGTATAATTTGG
GTAGGAAAGAGACTCATGCAGAAAGAAGCCCTGGAAGGCCAGAGCATCGTGGTCAGAGGTGTTGCCTTTG
GAGGGTCATTGCTGCCAGGAGCCGAATACCCACTGTATCCAATAACATTCATGGTCAGGAATGGTGGCTC
ACACCTGTAATCCCAACACTTTGGGATGCCCAGGTGGGAGGATTGCTTGAGGCCAGGAGTTTGAGACCAG
CCTGGGCAACACAGTGAGACCCCGTCTCTACATAAAATTAGAAAAAAACAATTAACTGGGTGTGGTGGTG
TGCACCTGTAGTCCCAGCTAGTCAAGAGGCTGAGACAAGAGGATCTCTTGAGCCCAGGAGCTCAAGGCTG
TAGTGAGCCAAGATCGTGCCACTGCACACAAACAATTATGTGACCTCGGGCAAGTTGCTTTACCTCTTTA
CACCTCTTAATTTCCTTATCTGTAAAATGAGGATGATAATTTCTTCCTGGGTCTGTTGTAATAATTAATA
CATCAAAGCACTTCATGTCTGGAACAGTGAAGATACCCTGCTATGACTATTAAGGATAGTATACATGGAA
TAAGACACAGGAACTTCTAAATGCTTTTGACCATAGATTTAGGTTCTGAGTTTTAAGAATTTAACTCAGG
AAATTGTAACACCAAAAATGTCATGTGAAAAATGGTGGTGACAAATTTTCTTGAATCATTAGCCTTAGAG
GTTGGGCAGAAAGCAAAAAATTATTCTTGATGCTACTCTATAGAAAGAGAAGACAGAAAAAGAGAAAGAT
GTATTTTTAAAGTCTATATCCATAACTTTATTTGACCAAACTCTAATTTAAAAATTATGTTTCAGAATTC
CAAAAACCAATATGCCTACCTTCCAAAGGTGACACAAGCACAATTTATACCAACTGTTGGGTAACCGGAT
GGGGCTTCTCGAAGGAGAAAGGTAAGCATGACGCTTTAAATATTGCTTCTAGAGTAAGTCTCACATGTTG
AAATACATGGAGTGGGTCGTTTTAATCGGTTTCTGTCTGAAATTATATCTAAACTCTTTATCTTTCCTAT
CTATTTATTCCCAAATATTTATTCAGTTATTCTTAAAAAATGTATTTTTGCTTTGGCTTGAAAAAAAATT
TTAGGGAGACTTTTAAGCATCTTACTTCATTATAAAGATCAGTTGCTTGACTTTGCATGAAGCAGATTGG
GCCCTTCTAGGGCTGACAAGCCCGTGCAAGACCACCCGCTCCTCAGTGTTAGTAGCGTTCCCGTCTCCCA
AAACCATGTTCTCCCTTGATGCTAATGGCCGGGAGCACAGGCAGGTGTGTCGTCTCACTATGGAGAATAA
TATTTGTGTCATTCTTTACAGAAGAAGGTAGCTTGCCAAACTGTCTCCATCTTTCCCGATTCAGTCTTTT
GTTCAAGTAATTCACATTTTTAGATTTTTTATTGGTAATCTGAGACAAGAAGAAATTTAAAGTAATCTTC
ACTAAGCCATGAAAGCTCCCAACATTGTTCTCCATGAGAGATGCTGGCCTGCATTTATTCAAAAACAAAA
GACCCCTCTGTTGCCAAAGCTCGGAGGGCTTTTCAGAAACGATATAGTTGTAAATTATAATTTTGAATAT
ATAAAGCAAAAAAATGAAAAGTGAGAACTTCCAGGCTTTGGATTGTTGTAGGTGATAAATATAAAATGGG
ATTTCTGGGGGGCTGCTACTGAGATGAGGGGATGGCAGAAAACATGGAAGCAAGGTCTCTGGTCAGCCCA
GGGTGCTGGGCTTGTCCCAACACCACGTAGGCAATAAGAGGACAGTACAGGGTGCCGTCTCTCTCCCTCT
TCCTCTCTCTGTCTCTCTCTCTCTGTGTGTGTGTGTGTGTGTGTGTGTAACACTACCTTCCCAATTTTTA
CTGTCTATTTGTATTCAAAGATAAGGTCCTTATGAAAAATACACTGCTCTGATTCACTTTAAAACTTATT
TCCATATTTATTATTTATTGTGGGAATAATAATATTCCCAATATTATTATTTATTATTTAAGTTATTATT
ATTAACTTCCCTCTGAGGTTATATATTGGTTACTCACAGGTGAAATCCAAAATATTCTACAAAAGGTAAA
TATTCCTTTGGTAACAAATGAAGAATGCCAGAAAAGATATCAAGATTATAAAATAACCCAACGGATGGTC
TGTGCTGGCTATAAAGAAGGGGGAAAAGATGCTTGTAAGGTAACTCATGAGATTATGAAAAACACAATAG
GCTGCTTGAGAAAATTCATTTCAAAATATATTTTCCAATAGCATAATTCAATCATAGTTTTTAAAAAAAT
TCAGAGACAAATGATCTGATAAATTGATAAGCAACTTTTAACAAATTGAATATACATAATATATATTTAT
ATTATTTATGATATATGTCACAATCTATGCATGTGCTATTTAAGAGGGGCAAATATACATGCAATAATTG
TGCTAGAATATAAAAACATTAGACTTCATCATTGGGATGATGATATCAAGATTTCTTTGTTAGATTTATT
TCAGATAGAAAAGGGGATACGAAAAATGCAGGCACATGAGATACTTGGAGAACTTTAAGAAAGAGTGAGT
GTGTGTGTGTGTGTGTGTGTGTGTGTGTGTGTGTCTGGCAAGCAAGGTCTTGCACACACACAGCACTTTG
GGAGGCCAATGCAGGTGGATCACTTGAGCCTAGGAATTTGAGACCAGTCTGGGCAATGTGATGAAACCCA
TCTCTACAAAAAAATATGAAAGTATCTGTGTGTGTGTGTTGCTGTGTAGTGGACTACAGAACTTTAGAGG
CAGTCACTTATTTGAATCCCATTGTCGTAACTTTCTACTATTTTATTTTTCCACTGTGACTCAGGGAGAT
TCAGGTGGTCCCTTAGTTTGCAAACACAATGGAATGTGGCGTTTGGTGGGCATCACCAGCTGGGGTGAAG
GCTGTGCCCGCAGGGAGCAACCTGGTGTCTACACCAAAGTCGCTGAGTACATGGACTGGATTTTAGAGAA
AACACAGAGCAGTGATGGAAAAGCTCAGATGCAGTCACCAGCATGAGAAGCAGTCCAGAGTCTAGGCAAT
TTTTACAACCTGAGTTCAAGTCAAATTCTGAGCCTGGGGGGTCCTCATCTGCAAAGCATGGAGAGTGGCA
TCTTCTTTGCATCCTAAGGACGAAAAACACAGTGCACTCAGAGCTGCTGAGGACAATGTCTGGCTGAAGC
CCGCTTTCAGCACGCCGTAACCAGGGGCTGACAATGCGAGGTCGCAACTGAGATCTCCATGACTGTGTGT
TGTGAAATAAAATGGTGAAAGATCA.

[0041] By “adenine” or “9H-Purin-6-amine” is meant a purine nucleobase with the molecular formula C₅H₅N₅, having the structure

[chemical structure]

and corresponding to CAS No. 73-24-5.

[0042] By “adenosine” or “4-Amino-1-[(2R,3R,4S,5R)-3,4-dihydroxy-5-(hydroxymethyl)oxolan-2-yl]pyrimidin-2(1H)-one” is meant an adenine molecule attached to a ribose sugar via a glycosidic bond, having the structure

[chemical structure]

and corresponding to CAS No. 65-46-3. Its molecular formula is C₁₀H₁₃N₅O₄.

[0043] By “adenosine deaminase” or “adenine deaminase” is meant a polypeptide or fragment thereof capable of catalyzing the hydrolytic deamination of adenine or adenosine. In some embodiments, the deaminase or deaminase domain is an adenosine deaminase catalyzing the hydrolytic deamination of adenosine to inosine or deoxy adenosine to deoxyinosine. In some embodiments, the adenosine deaminase catalyzes the hydrolytic deamination of adenine or adenosine in deoxyribonucleic acid (DNA). The adenosine deaminases (e.g. engineered adenosine deaminases, evolved adenosine deaminases) provided herein may be from any organism (e.g., eukaryotic, prokaryotic), including but not limited to algae, bacteria, fungi, plants, invertebrates (e.g., insects), and vertebrates (e.g., amphibians, mammals). In some embodiments, the adenosine deaminase is an adenosine deaminase variant with one or more alterations and is capable of deaminating both adenine and cytosine in a target polynucleotide (e.g., DNA, RNA). In some embodiments, the target polynucleotide is single or double stranded. In some embodiments, the adenosine deaminase variant is capable of deaminating both adenine and cytosine in DNA. In some embodiments, the adenosine deaminase variant is capable of deaminating both adenine and cytosine in single-stranded DNA. In some embodiments, the adenosine deaminase variant is capable of deaminating both adenine and cytosine in RNA.

[0044] By “adenosine deaminase activity” is meant catalyzing the deamination of adenine or adenosine to guanine in a polynucleotide. In some embodiments, an adenosine deaminase variant as provided herein maintains adenosine deaminase activity (e.g., at least about 30%, 40%, 50%, 60%, 70%, 80%, 90% or more of the activity of a reference adenosine deaminase (e.g., TadA*8.20 or TadA*8.19)).

[0045] By “Adenosine Base Editor (ABE)” is meant a base editor comprising an adenosine deaminase.

[0046] By “Adenosine Base Editor (ABE) polynucleotide” is meant a polynucleotide encoding an ABE. By “Adenosine Base Editor 8 (ABE8) polypeptide” or “ABE8” is meant a base editor as defined herein comprising one or more of the alterations listed in Table 15, one of the combinations of alterations listed in Table 15, or an alteration at one or more of the amino acid positions listed in Table 15, such alterations are relative to the following reference sequence of the following reference sequence:

MSEVEFSHEYWMRHALTLAKRARDEREVPVGAVLVLNNRVIGEGWNRAIGLHDPTAHAEIMALR QGGLVMQNYRLIDATLYVTFEPCVMCAGAMIHSRIGRVVFGVRNAKTGAAGSLMDVLHYPGMNH RVEITEGILADECAALLCYFFRMPRQVFNAQKKAQSSTD (SEQ ID NO: 1), or a corresponding position in another adenosine deaminase. In embodiments, ABE8 comprises alterations at amino acids 82 and/or 166 of SEQ ID NO: 1 In some embodiments, ABE8 comprises further alterations, as described herein, relative to the reference sequence.

[0047] By “Adenosine Base Editor 8 (ABE8) polynucleotide” is meant a polynucleotide encoding an ABE8 polypeptide.

[0048] “Administering” is referred to herein as providing one or more compositions described herein to a patient or a subject.

[0049] By “agent” is meant any small molecule chemical compound, antibody, nucleic acid molecule, or polypeptide, or fragments thereof.

[0050] By “alteration” is meant a change (increase or decrease) in the level, structure, or activity of an analyte, gene or polypeptide as detected by standard art known methods such as those described herein. As used herein, an alteration includes a 10% change in expression levels, a 25% change, a 40% change, and a 50% or greater change in expression levels. In some embodiments, an alteration includes an insertion, deletion, or substitution of a nucleobase or amino acid.

[0051] By “ameliorate” is meant decrease, suppress, attenuate, diminish, arrest, or stabilize the development or progression of a disease.

[0052] By “analog” is meant a molecule that is not identical, but has analogous functional or structural features. For example, a polypeptide analog retains the biological activity of a corresponding naturally-occurring polypeptide, while having certain biochemical modifications that enhance the analog's function relative to a naturally occurring polypeptide. Such biochemical modifications could increase the analog's protease resistance, membrane permeability, or half-life, without altering, for example, ligand binding. An analog may include an unnatural amino acid.

[0053] By “base editor (BE),” or “nucleobase editor polypeptide (NBE)” is meant an agent that binds a polynucleotide and has nucleobase modifying activity. In various embodiments, the base editor comprises a nucleobase modifying polypeptide (e.g., a deaminase) and a polynucleotide programmable nucleotide binding domain (e.g., Cas9 or Cpf1) in conjunction with a guide polynucleotide (e.g., guide RNA (gRNA)). Representative nucleic acid and protein sequences of base editors are provided in the Sequence Listing as SEQ ID NOs: 2-11.

[0054] By “base editing activity” is meant acting to chemically alter a base within a polynucleotide. In one embodiment, a first base is converted to a second base. In one embodiment, the base editing activity is cytidine deaminase activity, e.g., converting target C•G to T•A. In another embodiment, the base editing activity is adenosine or adenine deaminase activity, e.g., converting A•T to G•C.

[0055] The term “base editor system” refers to an intermolecular complex for editing a nucleobase of a target nucleotide sequence. In various embodiments, the base editor (BE) system comprises (1) a polynucleotide programmable nucleotide binding domain, a deaminase domain (e.g., cytidine deaminase or adenosine deaminase) for deaminating nucleobases in the target nucleotide sequence; and (2) one or more guide polynucleotides (e.g., guide RNA) in conjunction with the polynucleotide programmable nucleotide binding domain. In various embodiments, the base editor (BE) system comprises a nucleobase editor domain selected from an adenosine deaminase or a cytidine deaminase, and a domain having nucleic acid sequence specific binding activity. In some embodiments, the base editor system comprises (1) a base editor (BE) comprising a polynucleotide programmable DNA binding domain and a deaminase domain for deaminating one or more nucleobases in a target nucleotide sequence; and (2) one or more guide RNAs in conjunction with the polynucleotide programmable DNA binding domain. In some embodiments, the polynucleotide programmable nucleotide binding domain is a polynucleotide programmable DNA binding domain. In some embodiments, the base editor is a cytidine base editor (CBE). In some embodiments, the base editor is an adenine or adenosine base editor (ABE). In some embodiments, the base editor is an adenine or adenosine base editor (ABE) or a cytidine or cytosine base editor (CBE).

[0056] The term “Cas9” or “Cas9 domain” refers to an RNA guided nuclease comprising a Cas9 protein, or a fragment thereof (e.g., a protein comprising an active, inactive, or partially active DNA cleavage domain of Cas9, and/or the gRNA binding domain of Cas9). A Cas9 nuclease is also referred to sometimes as a casnl nuclease or a CRISPR (clustered regularly interspaced short palindromic repeat) associated nuclease.

[0057] The term “conservative amino acid substitution” or “conservative mutation” refers to the replacement of one amino acid by another amino acid with a common property. A functional way to define common properties between individual amino acids is to analyze the normalized frequencies of amino acid changes between corresponding proteins of homologous organisms (Schulz, G. E. and Schirmer, R. H., Principles of Protein Structure, Springer-Verlag, New York (1979)). According to such analyses, groups of amino acids can be defined where amino acids within a group exchange preferentially with each other, and therefore resemble each other most in their impact on the overall protein structure (Schulz, G. E. and Schirmer, R. H., supra). Non-limiting examples of conservative mutations include amino acid substitutions of amino acids, for example, lysine for arginine and vice versa such that a positive charge can be maintained; glutamic acid for aspartic acid and vice versa such that a negative charge can be maintained; serine for threonine such that a free —OH can be maintained; and glutamine for asparagine such that a free —NH₂ can be maintained.

[0058] The term “coding sequence” or “protein coding sequence” as used interchangeably herein refers to a segment of a polynucleotide that codes for a protein. Coding sequences can also be referred to as open reading frames. The region or sequence is bounded nearer the 5′ end by a start codon and nearer the 3′ end with a stop codon. Stop codons useful with the base editors described herein include the following.

| | |
|---|---|
| Glutamine | CAG→TAG Stop codon |
| | CAA→TAA |
| Arginine | CGA→TGA |
| Tryptophan | TGG→TGA |
| | TGG→TAG |
| | TGG→TAA |

[0059] By “complex” is meant a combination of two or more molecules whose interaction relies on inter-molecular forces. Non-limiting examples of inter-molecular forces include covalent and non-covalent interactions. Non-limiting examples of non-covalent interactions include hydrogen bonding, ionic bonding, halogen bonding, hydrophobic bonding, van der Waals interactions (e.g., dipole-dipole interactions, dipole-induced dipole interactions, and London dispersion forces), and 7-effects. In an embodiment, a complex comprises polypeptides, polynucleotides, or a combination of one or more polypeptides and one or more polynucleotides. In one embodiment, a complex comprises one or more polypeptides that associate to form a base editor (e.g., base editor comprising a nucleic acid programmable DNA binding protein, such as Cas9, and a deaminase) and a polynucleotide (e.g., a guide RNA). In an embodiment, the complex is held together by hydrogen bonds. It should be appreciated that one or more components of a base editor (e.g., a deaminase, or a nucleic acid programmable DNA binding protein) may associate covalently or non-covalently. As one example, a base editor may include a deaminase covalently linked to a nucleic acid programmable DNA binding protein (e.g., by a peptide bond).

[0060] Alternatively, a base editor may include a deaminase and a nucleic acid programmable DNA binding protein that associate noncovalently (e.g., where one or more components of the base editor are supplied in trans and associate directly or via another molecule such as a protein or nucleic acid). In an embodiment, one or more components of the complex are held together by hydrogen bonds.

[0061] By “cytosine” or “4-Aminopyrimidin-2(1H)-one” is meant a purine nucleobase with the molecular formula C₄H₅N₃O, having the structure

[chemical structure]

and corresponding to CAS No. 71-30-7.

[0062] By “cytidine” is meant a cytosine molecule attached to a ribose sugar via a glycosidic bond, having the structure

[chemical structure]

and corresponding to CAS No. 65-46-3. Its molecular formula is C₉H₁₃N₃O₅.

[0063] By “Cytidine Base Editor (CBE)” is meant a base editor comprising a cytidine deaminase.

[0064] By “Cytidine Base Editor (CBE) polynucleotide” is meant a polynucleotide comprising a CBE.

[0065] By “cytidine deaminase” or “cytosine deaminase” is meant a polypeptide or fragment thereof capable of deaminating cytidine or cytosine. In one embodiment, the cytidine deaminase converts cytosine to uracil or 5-methylcytosine to thymine. The terms “cytidine deaminase” and “cytosine deaminase” are used interchangeably throughout the application. Petromyzon marinus cytosine deaminase 1 (PmCDA1) (SEQ ID NO: 13-14), Activation-induced cytidine deaminase (AICDA) (SEQ ID NOs: 15-21), and APOBEC (SEQ ID NOs: 12-61) are exemplary cytidine deaminases. Further exemplary cytidine deaminase (CDA) sequences are provided in the Sequence Listing as SEQ ID NOs: 62-66 and SEQ ID NOs: 67-189.

[0066] By “cytosine” is meant a pyrimidine nucleobase with the molecular formula C4H5N30.

[0067] By “cytosine deaminase activity” is meant catalyzing the deamination of cytosine or cytidine. In one embodiment, a polypeptide having cytosine deaminase activity converts an amino group to a carbonyl group. In an embodiment, a cytosine deaminase converts cytosine to uracil (i.e., C to U) or 5-methylcytosine to thymine (i.e., 5mC to T). In some embodiments, a cytosine deaminase as provided herein has increased cytosine deaminase activity (e.g., at least 10-fold, 20-fold, 30-fold, 40-fold, 50-fold, 60-fold, 70-fold, 80-fold, 90-fold, 100-fold or more) relative to a reference cytosine deaminase.

[0068] The term “deaminase” or “deaminase domain,” as used herein, refers to a protein or fragment thereof that catalyzes a deamination reaction.

[0069] “Detect” refers to identifying the presence, absence, or amount of the analyte to be detected. In one embodiment, a sequence alteration in a polynucleotide or polypeptide is detected. In another embodiment, the presence of indels is detected.

[0070] By “detectable label” is meant a composition that when linked to a molecule of interest renders the latter detectable, via spectroscopic, photochemical, biochemical, immunochemical, or chemical means. For example, useful labels include radioactive isotopes, magnetic beads, metallic beads, colloidal particles, fluorescent dyes, electron-dense reagents, enzymes (for example, as commonly used in an enzyme linked immunosorbent assay (ELISA)), biotin, digoxigenin, or haptens.

[0071] By “disease” is meant any condition or disorder that damages or interferes with the normal function of a cell, tissue, or organ. Exemplary diseases include hereditary angioedema.

[0072] By “effective amount” is meant the amount of an agent or active compound, e.g., a base editor as described herein, that is required to ameliorate the symptoms of a disease relative to an untreated patient or an individual without disease, i.e., a healthy individual, or is the amount of the agent or active compound sufficient to elicit a desired biological response. The effective amount of active compound(s) used to practice the present invention for therapeutic treatment of a disease varies depending upon the manner of administration, the age, body weight, and general health of the subject. Ultimately, the attending physician or veterinarian will decide the appropriate amount and dosage regimen. Such amount is referred to as an “effective” amount. In one embodiment, an effective amount is the amount of a base editor of the invention sufficient to introduce an alteration in a gene of interest in a cell (e.g., a cell in vitro or in vivo). In one embodiment, an effective amount is the amount of a base editor required to achieve a therapeutic effect. Such therapeutic effect need not be sufficient to alter a pathogenic gene in all cells of a subject, tissue or organ, but only to alter the pathogenic gene in about 1%, 5%, 10%, 25%, 50%, 75% or more of the cells present in a subject, tissue or organ. In one embodiment, an effective amount is sufficient to ameliorate one or more symptoms of a disease.

[0073] The term “endonuclease” refers to a protein or polypeptide capable of catalyzing (e.g., cleaving) internal regions in a nucleic acid (e.g., DNA or RNA).

[0074] By “fragment” is meant a portion of a polypeptide or nucleic acid molecule. This portion contains, at least about 10%, 20%, 30%, 40%, 50%, 60%, 70%, 80%, or 90% of the entire length of the reference nucleic acid molecule or polypeptide. A fragment may contain 10, 20, 30, 40, 50, 60, 70, 80, 90, or 100, 200, 300, 400, 500, 600, 700, 800, 900, or 1000 nucleotides or amino acids.

[0075] By “gene” is meant a polynucleotide sequence that is transcribed as a single unit.

[0076] By “guide polynucleotide” is meant a polynucleotide or polynucleotide complex which is specific for a target sequence and can form a complex with a polynucleotide programmable nucleotide binding domain protein (e.g., Cas9 or Cpf1). In an embodiment, the guide polynucleotide is a guide RNA (gRNA). gRNAs can exist as a complex of two or more RNAs, or as a single RNA molecule.

[0077] By “heterologous,” or “exogenous” is meant a polynucleotide or polypeptide that 1) has been experimentally incorporated to a polynucleotide or polypeptide sequence to which the polynucleotide or polypeptide is not normally found in nature; or 2) has been experimentally placed into a cell that does not normally comprise the polynucleotide or polypeptide. In some embodiments, “heterologous” means that a polynucleotide or polypeptide has been experimentally placed into a non-native context. In some embodiments, a heterologous polynucleotide or polypeptide is derived from a first species or host organism, and is incorporated into a polynucleotide or polypeptide derived from a second species or host organism. In some embodiments, the first species or host organism is different from the second species or host organism. In some embodiments the heterologous polynucleotide is DNA. In some embodiments the heterologous polynucleotide is RNA. “Hybridization” means hydrogen bonding, which may be Watson-Crick, Hoogsteen or reversed Hoogsteen hydrogen bonding, between complementary nucleobases. For example, adenine and thymine are complementary nucleobases that pair through the formation of hydrogen bonds.

[0078] By “increases” is meant a positive alteration of at least 10%, 25%, 50%, 75%, or 100%.

[0079] The terms “inhibitor of base repair”, “base repair inhibitor”, “IBR” or their grammatical equivalents refer to a protein that is capable in inhibiting the activity of a nucleic acid repair enzyme, for example a base excision repair enzyme.

[0080] An “intein” is a fragment of a protein that is able to excise itself and join the remaining fragments (the exteins) with a peptide bond in a process known as protein splicing.

[0081] The terms “isolated,” “purified,” or “biologically pure” refer to material that is free to varying degrees from components which normally accompany it as found in its native state. “Isolate” denotes a degree of separation from original source or surroundings. “Purify” denotes a degree of separation that is higher than isolation. A “purified” or “biologically pure” protein is sufficiently free of other materials such that any impurities do not materially affect the biological properties of the protein or cause other adverse consequences. That is, a nucleic acid or peptide of this invention is purified if it is substantially free of cellular material, viral material, or culture medium when produced by recombinant DNA techniques, or chemical precursors or other chemicals when chemically synthesized. Purity and homogeneity are typically determined using analytical chemistry techniques, for example, polyacrylamide gel electrophoresis or high performance liquid chromatography. The term “purified” can denote that a nucleic acid or protein gives rise to essentially one band in an electrophoretic gel. For a protein that can be subjected to modifications, for example, phosphorylation or glycosylation, different modifications may give rise to different isolated proteins, which can be separately purified.

[0082] By “isolated polynucleotide” is meant a nucleic acid (e.g., a DNA) that is free of the genes which, in the naturally-occurring genome of the organism from which the nucleic acid molecule of the invention is derived, flank the gene. The term therefore includes, for example, a recombinant DNA that is incorporated into a vector; into an autonomously replicating plasmid or virus; or into the genomic DNA of a prokaryote or eukaryote; or that exists as a separate molecule (for example, a cDNA or a genomic or cDNA fragment produced by PCR or restriction endonuclease digestion) independent of other sequences. In addition, the term includes an RNA molecule that is transcribed from a DNA molecule, as well as a recombinant DNA that is part of a hybrid gene encoding additional polypeptide sequence.

[0083] By an “isolated polypeptide” is meant a polypeptide of the invention that has been separated from components that naturally accompany it. Typically, the polypeptide is isolated when it is at least 60%, by weight, free from the proteins and naturally-occurring organic molecules with which it is naturally associated. Preferably, the preparation is at least 75%, more preferably at least 90%, and most preferably at least 99%, by weight, a polypeptide of the invention. An isolated polypeptide of the invention may be obtained, for example, by extraction from a natural source, by expression of a recombinant nucleic acid encoding such a polypeptide; or by chemically synthesizing the protein. Purity can be measured by any appropriate method, for example, column chromatography, polyacrylamide gel electrophoresis, or by HPLC analysis.

[0084] By “marker” is meant any protein or polynucleotide having an alteration in expression, level, structure, or activity that is associated with a disease or disorder.

[0085] The term “mutation,” as used herein, refers to a substitution of a residue within a sequence, e.g., a nucleic acid or amino acid sequence, with another residue, or a deletion or insertion of one or more residues within a sequence. Mutations are typically described herein by identifying the original residue followed by the position of the residue within the sequence and by the identity of the newly substituted residue. Various methods for making the amino acid substitutions (mutations) provided herein are well known in the art, and are provided by, for example, Green and Sambrook, Molecular Cloning: A Laboratory Manual (4^{th} ed., Cold Spring Harbor Laboratory Press, Cold Spring Harbor, N.Y. (2012)).

[0086] The terms “nucleic acid” and “nucleic acid molecule,” as used herein, refer to a compound comprising a nucleobase and an acidic moiety, e.g., a nucleoside, a nucleotide, or a polymer of nucleotides. Typically, polymeric nucleic acids, e.g., nucleic acid molecules comprising three or more nucleotides are linear molecules, in which adjacent nucleotides are linked to each other via a phosphodiester linkage. In some embodiments, “nucleic acid” refers to individual nucleic acid residues (e.g. nucleotides and/or nucleosides). In some embodiments, “nucleic acid” refers to an oligonucleotide chain comprising three or more individual nucleotide residues. As used herein, the terms “oligonucleotide” and “polynucleotide” can be used interchangeably to refer to a polymer of nucleotides (e.g., a string of at least three nucleotides). In some embodiments, “nucleic acid” encompasses RNA as well as single and/or double-stranded DNA. Nucleic acids may be naturally occurring, for example, in the context of a genome, a transcript, an mRNA, tRNA, rRNA, siRNA, snRNA, a plasmid, cosmid, chromosome, chromatid, or other naturally occurring nucleic acid molecule. On the other hand, a nucleic acid molecule may be a non-naturally occurring molecule, e.g., a recombinant DNA or RNA, an artificial chromosome, an engineered genome, or fragment thereof, or a synthetic DNA, RNA, DNA/RNA hybrid, or including non-naturally occurring nucleotides or nucleosides. Furthermore, the terms “nucleic acid,” “DNA,” “RNA,” and/or similar terms include nucleic acid analogs, e.g., analogs having other than a phosphodiester backbone. Nucleic acids can be purified from natural sources, produced using recombinant expression systems and optionally purified, chemically synthesized, etc. Where appropriate, e.g., in the case of chemically synthesized molecules, nucleic acids can comprise nucleoside analogs such as analogs having chemically modified bases or sugars, and backbone modifications. A nucleic acid sequence is presented in the 5′ to 3′ direction unless otherwise indicated. In some embodiments, a nucleic acid is or comprises natural nucleosides (e.g. adenosine, thymidine, guanosine, cytidine, uridine, deoxyadenosine, deoxythymidine, deoxyguanosine, and deoxycytidine); nucleoside analogs (e.g., 2-aminoadenosine, 2-thiothymidine, inosine, pyrrolo-pyrimidine, 3-methyl adenosine, 5-methylcytidine, 2-aminoadenosine, C5-bromouridine, C5-fluorouridine, C5-iodouridine, C5-propynyl-uridine, C5-propynyl-cytidine, C5-methylcytidine, 2-aminoadenosine, 7-deazaadenosine, 7-deazaguanosine, 8-oxoadenosine, 8-oxoguanosine, 0(6)-methylguanine, and 2-thiocytidine); chemically modified bases; biologically modified bases (e.g., methylated bases); intercalated bases; modified sugars (2′—e.g., fluororibose, ribose, 2′-deoxyribose, arabinose, and hexose); and/or modified phosphate groups (e.g., phosphorothioates and 5′-N-phosphoramidite linkages).

[0087] The term “nuclear localization sequence,” “nuclear localization signal,” or “NLS” refers to an amino acid sequence that promotes import of a protein into the cell nucleus. Nuclear localization sequences are known in the art and described, for example, in Plank et al., International PCT application, PCT/EP2000/011690, filed Nov. 23, 2000, published as WO/2001/038547 on May 31, 2001, the contents of which are incorporated herein by reference for their disclosure of exemplary nuclear localization sequences. In other embodiments, the NLS is an optimized NLS described, for example, by Koblan et al., Nature Biotech. 2018 doi:10.1038/nbt.4172. In some embodiments an NLS comprises the amino acid sequence

(SEQ ID NO: 190)
KRTADGSEFESPKKKRKV,
(SEQ ID NO: 191)
KRPAATKKAGQAKKKK,
(SEQ ID NO: 192)
KKTELQTTNAENKTKKL,
(SEQ ID NO: 193)
KRGINDRNFWRGENGRKTR,
(SEQ ID NO: 194)
RKSGKIAAIVVKRPRK,
(SEQ ID NO: 195)
PKKKRKV,
or
(SEQ ID NO: 196)
MDSLLMNRRKFLYQFKNVRWAKGRRETYLC.

[0088] The term “nucleobase,” “nitrogenous base,” or “base,” used interchangeably herein, refers to a nitrogen-containing biological compound that forms a nucleoside, which in turn is a component of a nucleotide. The ability of nucleobases to form base pairs and to stack one upon another leads directly to long-chain helical structures such as ribonucleic acid (RNA) and deoxyribonucleic acid (DNA). Five nucleobases—adenine (A), cytosine (C), guanine (G), thymine (T), and uracil (U)—are called primary or canonical. Adenine and guanine are derived from purine, and cytosine, uracil, and thymine are derived from pyrimidine. DNA and RNA can also contain other (non-primary) bases that are modified. Non-limiting exemplary modified nucleobases can include hypoxanthine, xanthine, 7-methylguanine, 5,6-dihydrouracil, 5-methylcytosine (m5C), and 5-hydromethylcytosine. Hypoxanthine and xanthine can be created through mutagen presence, both of them through deamination (replacement of the amine group with a carbonyl group). Hypoxanthine can be modified from adenine. Xanthine can be modified from guanine. Uracil can result from deamination of cytosine. A “nucleoside” consists of a nucleobase and a five carbon sugar (either ribose or deoxyribose). Examples of a nucleoside include adenosine, guanosine, uridine, cytidine, 5-methyluridine (m5U), deoxyadenosine, deoxyguanosine, thymidine, deoxyuridine, and deoxycytidine. Examples of a nucleoside with a modified nucleobase includes inosine (I), xanthosine (X), 7-methylguanosine (m7G), dihydrouridine (D), 5-methylcytidine (m5C), and pseudouridine (ψ). A “nucleotide” consists of a nucleobase, a five carbon sugar (either ribose or deoxyribose), and at least one phosphate group. Non-limiting examples of modified nucleobases and/or chemical modifications that a modified nucleobase may include are the following: pseudo-uridine, 5-Methyl-cytosine, 2′-O-methyl-3′-phosphonoacetate, 2′-O-methyl thioPACE (MSP), 2′-O-methyl-PACE (MP), 2′-fluoro RNA (2′-F-RNA), constrained ethyl (S-cEt), 2′-O-methyl (‘M’), 2′-O-methyl-3′-phosphorothioate (‘MS’), 2′-O-methyl-3′-thiophosphonoacetate (‘MSP’), 5-methoxyuridine, phosphorothioate, and N1-Methylpseudouridine.

[0089] The term “nucleic acid programmable DNA binding protein” or “napDNAbp” may be used interchangeably with “polynucleotide programmable nucleotide binding domain” to refer to a protein that associates with a nucleic acid (e.g., DNA or RNA), such as a guide nucleic acid or guide polynucleotide (e.g., gRNA), that guides the napDNAbp to a specific nucleic acid sequence. In some embodiments, the polynucleotide programmable nucleotide binding domain is a polynucleotide programmable DNA binding domain. In some embodiments, the polynucleotide programmable nucleotide binding domain is a polynucleotide programmable RNA binding domain. In some embodiments, the polynucleotide programmable nucleotide binding domain is a Cas9 protein. A Cas9 protein can associate with a guide RNA that guides the Cas9 protein to a specific DNA sequence that is complementary to the guide RNA. In some embodiments, the napDNAbp is a Cas9 domain, for example a nuclease active Cas9, a Cas9 nickase (nCas9), or a nuclease inactive Cas9 (dCas9). Non-limiting examples of nucleic acid programmable DNA binding proteins include, Cas9 (e.g., dCas9 and nCas9), Cas12a/Cpf1, Cas12b/C2c1, Cas12c/C2c3, Cas12d/CasY, Cas12e/CasX, Cas12g, Cas12h, Cas12i, and Cas12j/CasΦ (Cas12j/Casphi). Non-limiting examples of Cas enzymes include Cas1, Cas1B, Cas2, Cas3, Cas4, Cas5, Cas5d, Cas5t, Cas5h, Cas5a, Cas6, Cas7, Cas8, Cas8a, Cas8b, Cas8c, Cas9 (also known as Csn1 or Csx12), Cas10, Cas10d, Cas12a/Cpf1, Cas12b/C2c1, Cas12c/C2c3, Cas12d/CasY, Cas12e/CasX, Cas12g, Cas12h, Cas12i, Cas12j/CasΦ, Cpf1, Csy1, Csy2, Csy3, Csy4, Cse1, Cse2, Cse3, Cse4, Cse5e, Csc1, Csc2, Csa5, Csn1, Csn2, Csm1, Csm2, Csm3, Csm4, Csm5, Csm6, Cmr1, Cmr3, Cmr4, Cmr5, Cmr6, Csb1, Csb2, Csb3, Csx17, Csx14, Csx10, Csx16, CsaX, Csx3, Csx1, Csx1S, Csx11, Csf1, Csf2, CsO, Csf4, Csd1, Csd2, Cst1, Cst2, Csh1, Csh2, Csa1, Csa2, Csa3, Csa4, Csa5, Type II Cas effector proteins, Type V Cas effector proteins, Type VI Cas effector proteins, CARF, DinG, homologues thereof, or modified or engineered versions thereof. Other nucleic acid programmable DNA binding proteins are also within the scope of this disclosure, although they may not be specifically listed in this disclosure. See, e.g., Makarova et al. “Classification and Nomenclature of CRISPR-Cas Systems: Where from Here?” CRISPR J. 2018 October;1:325-336. doi: 10.1089/crispr.2018.0033; Yan et al., “Functionally diverse type V CRISPR-Cas systems” Science. 2019 Jan. 4; 363(6422):88-91. doi: 10.1126/science.aav7271, the entire contents of each are hereby incorporated by reference. Exemplary nucleic acid programmable DNA binding proteins and nucleic acid sequences encoding nucleic acid programmable DNA binding proteins are provided in the Sequence Listing as SEQ ID NOs: 197-230.

[0090] The terms “nucleobase editing domain” or “nucleobase editing protein,” as used herein, refers to a protein or enzyme that can catalyze a nucleobase modification in RNA or DNA, such as cytosine (or cytidine) to uracil (or uridine) or thymine (or thymidine), and adenine (or adenosine) to hypoxanthine (or inosine) deaminations, as well as non-templated nucleotide additions and insertions. In some embodiments, the nucleobase editing domain is a deaminase domain (e.g., an adenine deaminase or an adenosine deaminase; or a cytidine deaminase or a cytosine deaminase).

[0091] As used herein, “obtaining” as in “obtaining an agent” includes synthesizing, purchasing, or otherwise acquiring the agent.

[0092] By “subject” is meant a mammal, including, but not limited to, a human or non-human mammal, such as a bovine, equine, canine, ovine, rodent, or feline. In an embodiment, “patient” refers to a mammalian subject with a higher than average likelihood of developing a disease or a disorder. Exemplary patients can be humans, non-human primates, cats, dogs, pigs, cattle, cats, horses, camels, llamas, goats, sheep, rodents (e.g., mice, rabbits, rats, or guinea pigs) and other mammalians that can benefit from the therapies disclosed herein. Exemplary human patients can be male and/or female.

[0093] “Patient in need thereof” or “subject in need thereof” is referred to herein as a patient diagnosed with, at risk or having, predetermined to have, or suspected of having a disease or disorder.

[0094] The terms “pathogenic mutation”, “pathogenic variant”, “disease casing mutation”, “disease causing variant”, “deleterious mutation”, or “predisposing mutation” refers to a genetic alteration or mutation that is associated with a disease or disorder or that increases an individual's susceptibility or predisposition to a certain disease or disorder. In some embodiments, the pathogenic mutation comprises at least one wild-type amino acid substituted by at least one pathogenic amino acid in a protein encoded by a gene. In some embodiments, the pathogenic mutation is in a terminating region (e.g., stop codon). In some embodiments, the pathogenic mutation is in a non-coding region (e.g., intron, promoter, etc.).

[0095] The terms “protein”, “peptide”, “polypeptide”, and their grammatical equivalents are used interchangeably herein, and refer to a polymer of amino acid residues linked together by peptide (amide) bonds. A protein, peptide, or polypeptide can be naturally occurring, recombinant, or synthetic, or any combination thereof.

[0096] The term “fusion protein” as used herein refers to a hybrid polypeptide which comprises protein domains from at least two different proteins.

[0097] The term “recombinant” as used herein in the context of proteins or nucleic acids refers to proteins or nucleic acids that do not occur in nature, but are the product of human engineering.

[0098] For example, in some embodiments, a recombinant protein or nucleic acid molecule comprises an amino acid or nucleotide sequence that comprises at least one, at least two, at least three, at least four, at least five, at least six, or at least seven mutations as compared to any naturally occurring sequence.

[0099] By “reduces” is meant a negative alteration of at least 10%, 25%, 50%, 75%, or 100%.

[0100] By “reference” is meant a standard or control condition. In one embodiment, the reference is a wild-type or healthy cell. In other embodiments and without limitation, a reference is an untreated cell that is not subjected to a test condition, or is subjected to placebo or normal saline, medium, buffer, and/or a control vector that does not harbor a polynucleotide of interest.

[0101] A “reference sequence” is a defined sequence used as a basis for sequence comparison. A reference sequence may be a subset of or the entirety of a specified sequence; for example, a segment of a full-length cDNA or gene sequence, or the complete cDNA or gene sequence. For polypeptides, the length of the reference polypeptide sequence will generally be at least about 16 amino acids, at least about 20 amino acids, at least about 25 amino acids, about 35 amino acids, about 50 amino acids, or about 100 amino acids. For nucleic acids, the length of the reference nucleic acid sequence will generally be at least about 50 nucleotides, at least about 60 nucleotides, at least about 75 nucleotides, about 100 nucleotides or about 300 nucleotides or any integer thereabout or therebetween. In some embodiments, a reference sequence is a wild-type sequence of a protein of interest. In other embodiments, a reference sequence is a polynucleotide sequence encoding a wild-type protein.

[0102] The term “RNA-programmable nuclease,” and “RNA-guided nuclease” are used with (e.g., binds or associates with) one or more RNA(s) that is not a target for cleavage. In some embodiments, an RNA-programmable nuclease, when in a complex with an RNA, may be referred to as a nuclease:RNA complex. Typically, the bound RNA(s) is referred to as a guide RNA (gRNA). In some embodiments, the RNA-programmable nuclease is the (CRISPR-associated system) Cas9 endonuclease, for example, Cas9 (Csn1) from Streptococcus pyogenes.

[0103] The term “single nucleotide polymorphism (SNP)” is a variation in a single nucleotide that occurs at a specific position in the genome, where each variation is present to some appreciable degree within a population (e.g., >1%). SNPs can fall within coding regions of genes, non-coding regions of genes, or in the intergenic regions (regions between genes). In some embodiments, SNPs within a coding sequence do not necessarily change the amino acid sequence of the protein that is produced, due to degeneracy of the genetic code. SNPs in the coding region are of two types: synonymous and nonsynonymous SNPs. Synonymous SNPs do not affect the protein sequence, while nonsynonymous SNPs change the amino acid sequence of protein. The nonsynonymous SNPs are of two types: missense and nonsense. SNPs that are not in protein-coding regions can still affect gene splicing, transcription factor binding, messenger RNA degradation, or the sequence of noncoding RNA. Gene expression affected by this type of SNP is referred to as an eSNP (expression SNP) and can be upstream or downstream from the gene. A single nucleotide variant (SNV) is a variation in a single nucleotide without any limitations of frequency and can arise in somatic cells. A somatic single nucleotide variation can also be called a single-nucleotide alteration.

[0104] By “specifically binds” is meant a nucleic acid molecule, polypeptide, polypeptide/polynucleotide complex, compound, or molecule that recognizes and binds a polypeptide and/or nucleic acid molecule of the invention, but which does not substantially recognize and bind other molecules in a sample, for example, a biological sample.

[0105] By “substantially identical” is meant a polypeptide or nucleic acid molecule exhibiting at least 50% identity to a reference amino acid sequence. In one embodiment, a reference sequence is a wild-type amino acid or nucleic acid sequence. In another embodiment, a reference sequence is any one of the amino acid or nucleic acid sequences described herein. In one embodiment, such a sequence is at least 60%, 80%, 85%, 90%, 95% or even 99% identical at the amino acid level or nucleic acid level to the sequence used for comparison.

[0106] Sequence identity is typically measured using sequence analysis software (for example, Sequence Analysis Software Package of the Genetics Computer Group, University of Wisconsin Biotechnology Center, 1710 University Avenue, Madison, Wis. 53705, BLAST, BESTFIT, GAP, or PILEUP/PRETTYBOX programs). Such software matches identical or similar sequences by assigning degrees of homology to various substitutions, deletions, and/or other modifications. Conservative substitutions typically include substitutions within the following groups: glycine, alanine; valine, isoleucine, leucine; aspartic acid, glutamic acid, asparagine, glutamine; serine, threonine; lysine, arginine; and phenylalanine, tyrosine. In an exemplary approach to determining the degree of identity, a BLAST program may be used, with a probability score between e⁻³ and e⁻¹⁰⁰ indicating a closely related sequence.

COBALT is used, for example, with the following parameters:
[0107] a) alignment parameters: Gap penalties-11, -1 and End-Gap penalties-5, -1,
[0108] b) CDD Parameters: Use RPS BLAST on; Blast E-value 0.003; Find Conserved columns and Recompute on, and
[0109] c) Query Clustering Parameters: Use query clusters on; Word Size 4; Max cluster distance 0.8; Alphabet Regular.
   EMBOSS Needle is used, for example, with the following parameters:
[0110] a) Matrix: BLOSUM62;
[0111] b) GAP OPEN: 10;
[0112] c) GAP EXTEND: 0.5;
[0113] d) OUTPUT FORMAT: pair;
[0114] e) END GAP PENALTY: false;
[0115] f) END GAP OPEN: 10; and
[0116] g) END GAP EXTEND: 0.5.

[0117] Nucleic acid molecules useful in the methods of the invention include any nucleic acid molecule that encodes a polypeptide of the invention or a fragment thereof. Such nucleic acid molecules need not be 100% identical with an endogenous nucleic acid sequence, but will typically exhibit substantial identity. Polynucleotides having “substantial identity” to an endogenous sequence are typically capable of hybridizing with at least one strand of a double-stranded nucleic acid molecule. Nucleic acid molecules useful in the methods of the invention include any nucleic acid molecule that encodes a polypeptide of the invention or a fragment thereof. Such nucleic acid molecules need not be 100% identical with an endogenous nucleic acid sequence, but will typically exhibit substantial identity. Polynucleotides having “substantial identity” to an endogenous sequence are typically capable of hybridizing with at least one strand of a double-stranded nucleic acid molecule. By “hybridize” is meant pair to form a double-stranded molecule between complementary polynucleotide sequences (e.g., a gene described herein), or portions thereof, under various conditions of stringency. (See, e.g., Wahl, G. M. and S. L. Berger (1987) Methods Enzymol. 152:399; Kimmel, A. R. (1987) Methods Enzymol. 152:507).

[0118] For example, stringent salt concentration will ordinarily be less than about 750 mM NaCl and 75 mM trisodium citrate, preferably less than about 500 mM NaCl and 50 mM trisodium citrate, and more preferably less than about 250 mM NaCl and 25 mM trisodium citrate. Low stringency hybridization can be obtained in the absence of organic solvent, e.g., formamide, while high stringency hybridization can be obtained in the presence of at least about 35% formamide, and more preferably at least about 50% formamide. Stringent temperature conditions will ordinarily include temperatures of at least about 30° C., more preferably of at least about 37° C., and most preferably of at least about 42° C. Varying additional parameters, such as hybridization time, the concentration of detergent, e.g., sodium dodecyl sulfate (SDS), and the inclusion or exclusion of carrier DNA, are well known to those skilled in the art. Various levels of stringency are accomplished by combining these various conditions as needed. In a preferred: embodiment, hybridization will occur at 30° C. in 750 mM NaCl, 75 mM trisodium citrate, and 1% SDS. In a more preferred embodiment, hybridization will occur at 37° C. in 500 mM NaCl, 50 mM trisodium citrate, 1% SDS, 35% formamide, and 100 μg/ml denatured salmon sperm DNA (ssDNA). In a most preferred embodiment, hybridization will occur at 42° C. in 250 mM NaCl, 25 mM trisodium citrate, 1% SDS, 50% formamide, and 200 μg/ml ssDNA. Useful variations on these conditions will be readily apparent to those skilled in the art.

[0119] For most applications, washing steps that follow hybridization will also vary in stringency. Wash stringency conditions can be defined by salt concentration and by temperature. As above, wash stringency can be increased by decreasing salt concentration or by increasing temperature. For example, stringent salt concentration for the wash steps will preferably be less than about 30 mM NaCl and 3 mM trisodium citrate, and most preferably less than about 15 mM NaCl and 1.5 mM trisodium citrate. Stringent temperature conditions for the wash steps will ordinarily include a temperature of at least about 25° C., more preferably of at least about 42° C., and even more preferably of at least about 68° C. In an embodiment, wash steps will occur at 25° C. in 30 mM NaCl, 3 mM trisodium citrate, and 0.1% SDS. In another embodiment, wash steps will occur at 42 C in 15 mM NaCl, 1.5 mM trisodium citrate, and 0.1% SDS. In a more preferred embodiment, wash steps will occur at 68° C. in 15 mM NaCl, 1.5 mM trisodium citrate, and 0.1% SDS. Additional variations on these conditions will be readily apparent to those skilled in the art. Hybridization techniques are well known to those skilled in the art and are described, for example, in Benton and Davis (Science 196:180, 1977); Grunstein and Hogness (Proc. Natl. Acad. Sci., USA 72:3961, 1975); Ausubel et al. (Current Protocols in Molecular Biology, Wiley Interscience, New York, 2001); Berger and Kimmel (Guide to Molecular Cloning Techniques, 1987, Academic Press, New York); and Sambrook et al., Molecular Cloning: A Laboratory Manual, Cold Spring Harbor Laboratory Press, New York.

[0120] By “split” is meant divided into two or more fragments.

[0121] A “split Cas9 protein” or “split Cas9” refers to a Cas9 protein that is provided as an N-terminal fragment and a C-terminal fragment encoded by two separate nucleotide sequences. The polypeptides corresponding to the N-terminal portion and the C-terminal portion of the Cas9 protein may be spliced to form a “reconstituted” Cas9 protein.

[0122] The term “target site” refers to a sequence within a nucleic acid molecule that is deaminated by a deaminase (e.g., cytidine or adenine deaminase), a fusion protein comprising a deaminase (e.g., a dCas9-adenosine deaminase fusion protein), or a base editor (e.g., adenine or adenosine base editor (ABE) or a cytidine or a cytosine base editor (CBE)) as disclosed herein).

[0123] As used herein, the terms “treat,” treating,” “treatment,” and the like refer to reducing or ameliorating a disorder and/or symptoms associated therewith or obtaining a desired pharmacologic and/or physiologic effect. It will be appreciated that, although not precluded, treating a disorder or condition does not require that the disorder, condition or symptoms associated therewith be completely eliminated. In some embodiments, the effect is therapeutic, i.e., without limitation, the effect partially or completely reduces, diminishes, abrogates, abates, alleviates, decreases the intensity of, or cures a disease and/or adverse symptom attributable to the disease. In some embodiments, the effect is preventative, i.e., the effect protects or prevents an occurrence or reoccurrence of a disease or condition. To this end, the presently disclosed methods comprise administering a therapeutically effective amount of a compositions as described herein.

[0124] By “uracil glycosylase inhibitor” or “UGI” is meant an agent that inhibits the uracil-excision repair system. Base editors comprising a cytidine deaminase convert cytosine to uracil, which is then converted to thymine through DNA replication or repair. Including an inhibitor of uracil DNA glycosylase (UGI) in the base editor prevents base excision repair which changes the U back to a C. An exemplary UGI comprises an amino acid sequence as follows:

>splP14739IUNGI_BPPB2 Uracil-DNA glycosylase inhibitor

(SEQ ID NO: 231)
MTNLSDIIEKETGKQLVIQESILMLPEEVEEVIGNKPESDILVHTAYDE
STDENVMLLTSDAPEYKPWALVIQDSNGENKIKML.

[0125] Ranges provided herein are understood to be shorthand for all of the values within the range. For example, a range of 1 to 50 is understood to include any number, combination of numbers, or sub-range from the group consisting 1, 2, 3, 4, 5, 6, 7, 8, 9, 10, 11, 12, 13, 14, 15, 16, 17, 18, 19, 20, 21, 22, 23, 24, 25, 26, 27, 28, 29, 30, 31, 32, 33, 34, 35, 36, 37, 38, 39, 40, 41, 42, 43, 44, 45, 46, 47, 48, 49, or 50.

[0126] The recitation of a listing of chemical groups in any definition of a variable herein includes definitions of that variable as any single group or combination of listed groups. The recitation of an embodiment for a variable or aspect herein includes that embodiment as any single embodiment or in combination with any other embodiments or portions thereof.

[0127] All terms are intended to be understood as they would be understood by a person skilled in the art. Unless defined otherwise, all technical and scientific terms used herein have the same meaning as commonly understood by one of ordinary skill in the art to which the disclosure pertains

[0128] In this application, the use of the singular includes the plural unless specifically stated otherwise. It must be noted that, as used in the specification, the singular forms “a,” “an” and “the” include plural referents unless the context clearly dictates otherwise. In this application, the use of “or” means “and/or” unless stated otherwise. Furthermore, use of the term “including” as well as other forms, such as “include”, “includes,” and “included,” is not limiting.

[0129] As used in this specification and claim(s), the words “comprising” (and any form of comprising, such as “comprise” and “comprises”), “having” (and any form of having, such as “have” and “has”), “including” (and any form of including, such as “includes” and “include”) or “containing” (and any form of containing, such as “contains” and “contain”) are inclusive or open-ended and do not exclude additional, unrecited elements or method steps. Any embodiments specified as “comprising” a particular component(s) or element(s) are also contemplated as “consisting of” or “consisting essentially of” the particular component(s) or element(s) in some embodiments. It is contemplated that any embodiment discussed in this specification can be implemented with respect to any method or composition of the present disclosure, and vice versa. Furthermore, compositions of the present disclosure can be used to achieve methods of the present disclosure.

[0130] The term “about” or “approximately” means within an acceptable error range for the particular value as determined by one of ordinary skill in the art, which will depend in part on how the value is measured or determined, i.e., the limitations of the measurement system Reference in the specification to “some embodiments,” “an embodiment,” “one embodiment” or “other embodiments” means that a particular feature, structure, or characteristic described in connection with the embodiments is included in at least some embodiments, but not necessarily all embodiments, of the present disclosures.

### BRIEF DESCRIPTION OF THE DRAWINGS

[0131] FIG. 1 provides a bar graph showing human KLKB1 protein concentrations measured by ELISA in PXB-cell hepatocytes prior to transfection with mRNA encoding the indicated base editors and the indicated guide polynucleotides (x-axis). Each condition was run in triplicate, as represented by each dot in the bar graph. The bars show the mean KLKB1 protein concentrations, and error bars indicate standard deviations. See Tables 1A and 1B for guide sequences. In FIG. 1, the terms “VRQR” and “MQKFRAER” indicate alterations in the Cas9 variant contained in the base editor (see, e.g., Table 7).

[0132] FIG. 2 provides a bar graph showing base editing rates (dark grey bars and squares; left axis) in PXB-cell hepatocytes at target sites assessed at 13 days post-transfection by next-generation sequencing (NGS), and human KLKB1 protein concentrations (light grey bars and circles; right axis) assessed 7 days post-transfection by ELISA. Each condition was run in triplicate, as represented by each circle or square in the graph. The dashed line indicates the average human KLKB1 concentration for cells altered using the system containing gRNA2666+Cas9 Nuclease. The starred bar indicates that the bar corresponds to maximum indel rate within a target site, rather than rate of target base-editing. See Tables 1A and 1B for guide sequences. In FIG. 2, the terms “VRQR” and “MQKFRAER” indicate alterations in the Cas9 variant contained in the base editor (see, e.g., Table 7).

[0133] FIG. 3 provides a bar graph showing base editing rates (dark grey bars and squares; left axis) in PXB-cell hepatocytes at target sites assessed at 13 days post-transfection by next-generation sequencing (NGS), and human KLKB1 protein concentrations (light grey bars and circles; right axis) assessed 13 days post-transfection by ELISA. Each condition was run in triplicate, as represented by each circle or square in the graph. The dashed line indicates the average human KLKB1 concentration for cells altered using the system containing gRNA2666+Cas9 Nuclease. The starred bar indicates that the bar corresponds to maximum indel rate within a target site, rather than rate of target base-editing. See Tables 1A and 1B for guide sequences. In FIG. 3, the terms “VRQR” and “MQKFRAER” indicate alterations in the Cas9 variant contained in the base editor (see, e.g., Table 7).

### DETAILED DESCRIPTION OF THE INVENTION

[0134] Provided herein are base editors, endonucleases, and guide RNAs (gRNAs) for use in editing, modifying or altering a target polynucleotide. In particular embodiments, a base editor or endonuclease of the present disclosure modifies a KLKB1 polynucleotide. In particular embodiments, a base editor of the invention introduces a stop codon, missense mutation, or indel (e.g., a 1, 2, 3, 4, 5, 6, 7, 8, 9, or 10-nucleotide acid insertion or deletion (indel)) alteration in an KLKB1 polynucleotide or disrupts a splice site in the KLKB1 polynucleotide. The alterations are associated with a reduction in activity or levels of a KLKB1 polypeptide and/or polynucleotide in a cell.

[0135] The invention is based, at least in part, upon the discovery that base editing (e.g., disruption of splice acceptor or splice donor, or introduction of a stop codon, missense mutation, or indel alteration) can be used to reduce the expression of a KLKB1 polypeptide with hereditary angioedema. In particular, reducing activity and/or expression of the KLKB1 polypeptide in a subject diagnosed with hereditary angioedema can be an effective treatment strategy. This reduction in activity and/or expression can be effected using any of the base editing systems and/or endonucleases and methods provided herein. Accordingly, the invention features compositions and methods for editing a KLKB1 polynucleotide. The edit to the KLKB1 polynucleotide is associated with a reduction expression of a KLKB1 polypeptide in a cell of a subject, as well as in symptoms associated with hereditary angioedema.

[0136] In embodiments, the methods of the present disclosure include disrupting splicing of a KLKB1 polynucleotide transcript. For example, the base editors or base editor systems provided herein can be used for editing a nucleobase in the splice acceptor situated 5′ of an exon of the KLKB1 polynucleotide. In some embodiments, the target sequence is a splice acceptor in the intron of an intron sequence adjacent to an exon of the KLKB1 polynucleotide and is associated with a change in the splice acceptor compared to a wild-type splice acceptor. In some embodiments, the deamination of an A or C nucleobase in the splice acceptor results in disruption of splicing of the mRNA transcript during transcription. In some embodiments, the subject has or has the potential to develop hereditary angioedema.

[0137] In some instances, the methods of the present disclosure include modifying a KLKB1 polynucleotide to introduce a stop codon, indel, or missense mutation associated with a reduction in levels or activity of the KLKB1 polynucleotide and/or polypeptide. The alterations can be effected by a base editor system or by an endonuclease (e.g., a Cas9), such as those described herein.

[0138] In some embodiments, the present disclosure provides base editors or nucleases that efficiently generate an intended mutation, such as a point mutation or indel, in a nucleic acid molecule (e.g., a nucleic acid within a genome of a subject) without generating a significant number of unintended mutations, such as unintended point mutations. In some embodiments, an intended mutation is a mutation that is generated by a specific base editor (e.g., an adenosine base editor or a cytidine base editor) or endonuclease (e.g., Cas9) bound to a guide polynucleotide (e.g., gRNA), specifically designed to generate the intended mutation. In some embodiments, the intended mutation is an adenine (A) to guanine (G) point mutation within the non-coding region of a gene. In some embodiments, the intended mutation is a cytosine (C) to thymine (T) point mutation within the non-coding region of a gene. In some embodiments, the intended mutation is a mutation of a splice acceptor in the non-coding region 5′ of an exon of a gene associated with a disease or disorder. In some instances, the intended mutation is an indel mutation. In some embodiments, the intended mutation is an adenine (A) to guanine (G) point mutation in the splice acceptor in the non-coding region 5′ of an exon of a gene associated with a disease or disorder. In some embodiments, the intended mutation is a missense mutation. The intended mutation can include the introduction of a stop codon to a polynucleotide sequence. In some embodiments, the intended mutation is a mutation that disrupts normal splicing of a complete transcript of a gene, for example, an A to G change in the splice acceptor within the non-coding region located 5′ of an exon of a disease-causing or a disease-associated gene. In some embodiments, the intended mutation is a mutation in the splice acceptor that disrupts splicing of a gene transcript and results in an alternative transcript that encodes a truncated and/or nonfunctional protein product.

[0139] In some embodiments, any of the base editors or endonucleases provided herein are capable of generating a ratio of intended mutations to unintended mutations (e.g., intended point mutations:unintended point mutations) that is greater than 1:1. In some embodiments, any of the base editors provided herein are capable of generating a ratio of intended mutations to unintended mutations (e.g., intended point mutations:unintended point mutations) that is at least 1.5:1, at least 2:1, at least 2.5:1, at least 3:1, at least 3.5:1, at least 4:1, at least 4.5:1, at least 5:1, at least 5.5:1, at least 6:1, at least 6.5:1, at least 7:1, at least 7.5:1, at least 8:1, at least 10:1, at least 12:1, at least 15:1, at least 20:1, at least 25:1, at least 30:1, at least 40:1, at least 50:1, at least 100:1, at least 150:1, at least 200:1, at least 250:1, at least 500:1, or at least 1000:1, or more.

[0140] In some embodiments, editing of a plurality of nucleobase pairs in one or more genes using the methods provided herein results in formation of at least one intended mutation. In some embodiments, the formation of the at least one intended mutation is in the splice acceptor 5′ of an exon of a disease-associated gene and results in disruption of splicing of the mRNA transcript of a disease-associated gene. It should be appreciated that multiplex editing can be accomplished using any method or combination of methods provided herein.

[0141] The present disclosure provides methods for the treatment of a subject diagnosed with hereditary angioedema. For example, in some embodiments, a method is provided that comprises administering to a subject having or having a propensity to develop hereditary angioedema, an effective amount of a nucleobase editor (e.g., an adenosine deaminase base editor or a cytidine deaminase base editor) or endonuclease to effect an alteration in a KLKB1 polynucleotide sequence.

### Hereditary Angioedema (HAE)

[0142] Hereditary angioedema is a rare inherited disorder characterized by recurrent episodes of the accumulation of fluids outside of the blood vessels from vascular leakage, blocking the normal flow of blood or lymphatic fluid and causing rapid swelling of tissues in the hands, feet, limbs, face, intestinal tract, or airway. Usually, this swelling is not accompanied by itching, as it might be with an allergic reaction. Swelling of the gastrointestinal tract leads to cramping. Swelling of the airway may lead to obstruction, a potentially very serious complication. These symptoms develop as the result of deficiency or improper functioning of certain proteins that help to maintain the normal flow of fluids through very small blood vessels (capillaries). In some cases, fluid may accumulate in other internal organs. The severity of the disease varies greatly among affected individuals.

[0143] The most common form of the disorder is hereditary angioedema type I, which is the result of abnormally low levels of certain complex proteins in the blood (C1 esterase inhibitors), known as complements. They help to regulate various body functions (e.g., flow of body fluids in and out of cells). Hereditary angioedema type II, a more uncommon form of the disorder, occurs as the result of the production of abnormal complement proteins.

[0144] The characteristic symptom of hereditary angioedema is recurrent episodes of swelling of affected areas due to the accumulation of excessive body fluid (edema). The areas of the body most commonly affected include the hands, feet, eyelids, lips, and/or genitals. Edema may also occur in the mucous membranes that line the respiratory and digestive tracts, which is more common in people with hereditary angioedema than in those who have other forms of angioedema (i.e., acquired or traumatic). People with this disorder typically have areas of swelling that are hard and painful, not red and itchy (pruritic). A skin rash (urticaria) rarely is present.

[0145] The symptoms of hereditary angioedema may recur and can become more severe. Symptoms associated with swelling in the digestive system (gastrointestinal tract) include nausea, vomiting, acute abdominal pain, and/or other signs of obstruction. Edema of the throat (pharynx) or voice-box (larynx) can result in pain, difficulty swallowing (dysphagia), difficulty speaking (dysphonia), noisy respiration (stridor), and potentially life-threatening asphyxiation.

[0146] The diagnosis of hereditary angioedema is made by a thorough clinical evaluation, a detailed patient history, and blood tests that detect decreased levels of complement proteins. In instances of high clinical suspicion and recurrent episodic angioedema of uncertain etiology, genetic testing is indicated.

[0147] Laboratory analysis of blood samples, or genetic samples, are required to establish an HAE diagnosis. There are three specific blood tests used to confirm Hereditary Angioedema: 1. C1-Inhibitor quantitative (antigenic); 2. C1-Inhibitor functional; 3. C4.

[0148] Genetic testing for HAE with Normal C1-Inhibitor can determine if there is a defect in one of the other three genes that have been shown to also cause HAE.

[0149] In 2008, the Food and Drug Administration (FDA) approved Cinryze, a C1 inhibitor therapy, for routine prevention (prophylaxis) of attacks of spontaneous swelling (angioedema) in adolescents and adults with HAE. This is the first drug approved for this purpose in the U.S. In 2009, FDA approved Berinert, to treat acute abdominal attacks and facial swelling associated with HAE in adults and adolescents. It is a protein product derived from human plasma. In 2016, FDA approved Berinert, as the first and only pediatric treatment for HAE. Also in 2009, FDA approved Kalbitor (ecallantide) to treat sudden and potentially life-threatening fluid buildup related to HAE. Kalbitor is a liquid that is intended to be injected under the skin of people age 16 and older with HAE. In 2014, FDA approved Ruconest, a recombinant C1-esterase inhibitor for the treatment of acute attacks in adult and adolescent patients with HAE. In 2017, FDA approved Haegarda (C1-esterase inhibitor) for administration under the skin to prevent HAE attacks. Most recently, in 2020, FDA approved Orladeyo (berotralstat) to prevent attacks in patients 12 years of age and older with HAE. Orladeyo is an oral capsule taken one time per day. In embodiments, any one or more of the above-referenced drugs can be used in combination with the methods of the present disclosure or administered in combination with compositions of the present disclosure.

### KLKB1

[0150] KLKB1 encodes prekallikrenin (PK). Not intending to be bound by theory, in plasma, cleavage of high-molecular-weight kininogen (HK) by PK leads to the release of bradykinin. In tissues, cleavage of low molecular weight kininogen (68 kDa) by tissue kallikreins leads to the release of kallidin. Bradykinin and kallidin are recognized by the kinin B2 receptor (B2R), which is constitutively expressed on vascular endothelial cells. Activation of this G-protein-coupled receptor leads to vascular leakage through induction of endothelial cell contractility, uncoupling of endothelial cell junctions, production of nitric oxide, and prostacyclin. Activation of B2R is also associated with inflammation (e.g., vasodilatation, edema, and pain). Thus, reducing expression and/or activity of KLKB1 in a subject can be an effective treatment for HAE, which is associated with increases in local vascular permeability and fluid accumulation in deeper layers of skin or mucosal tissues. Indeed, PK and HK are consumed during HAE attacks.

### Editing of Target Genes

[0151] Exemplary spacer sequences suitable for use in guide RNAs that can be used to produce the polynucleotide edits described above (e.g., missense mutations, stop codons, indel mutations, splice-site disruption mutations, etc.) are listed in Tables 1A and 1B below. To produce the polynucleotide edits, cells (e.g., cells in or from a subject, such as hepatocytes) of a subject are contacted with one or more guide RNAs containing one or more of the spacer sequences listed in Table 1A or Table 1B below, or fragments thereof, and an endonuclease or a nucleobase editor polypeptide or complex containing a nucleic acid programmable DNA binding protein (napDNAbp) and a cytidine deaminase or adenosine deaminase. In embodiments, the base editor and/or endonuclease is introduced to the cell using a polynucleotide sequence (e.g., mRNA) encoding the base editor and/or endonuclease. Tables 1A and 1B below list representative guide RNA spacer sequences that can be used in combination with the indicated editors (e.g., endonucleases or base editors). Guide RNAs containing the spacer sequences listed in Table 1A or Table 1B can be used to target sequences, such as those listed in Table 1A, to effect nucleobase edits, such as those listed in Table 1A. In some embodiments, the gRNA comprises nucleotide analogs. These nucleotide analogs can inhibit degradation of the gRNA from cellular processes. Table 1A provides target sequences to be used for gRNAs. Further exemplary spacer sequences suitable for use in gRNA sequences for use in the methods provided herein include fragments of any of the spacers provided in Tables 1A and 1B as well as any of the spacers provided in Tables 1A and 1B modified to include an extension or truncation at the 3′ and/or 5′ end(s). In embodiments, a spacer sequence of Table 1A or Table 1B can be modified to include a 1, 2, 3, 4, 5, 6, 7, 8, 9, or 10 nucleotide extension or truncation at the 3′ and/or 5′ end(s).

TABLE 1A
Exemplary KLKB1 polynucleotide Target Sequences and Spacers corresponding to the guide RNAs of Table 1B. In the column
titled “Edit Type,” missense mutations are designated by listing representative amino acid alterations (e.g., “H158R, K159E”), alterations to a
splice site are indicated by the phrase “Splice Site,” and introduction of a stop codon is indicated by the phrase “Stop Codon.”

| Guide | | SEQ ID | | | SEQ ID | | |
|---|---|---|---|---|---|---|---|
| Name | Target Sequence | NO | PAM | Spacer Sequence | NO | Editor | Edit Type |
| Guide 1 | CTTACCTTTCTCCTTCGAGAAGC | 380 | AGC | CUUACCUUUCUCCUUCGAGA | 567 | spCas9 | Splice Site |
| | | | | | | MQKFRAER | |
| | | | | | | ABE | |
| Guide 2 | ATACCAGTGTAATTCAAAGGAGC | 381 | AGC | AUACCAGUGUAAUUCAAAGG | 568 | spCas9 | Splice Site |
| | | | | | | MQKFRAER | |
| | | | | | | ABE | |
| Guide 3 | ACTTACCCATCAAAGCAGTGGGC | 382 | GGC | ACUUACCCAUCAAAGCAGUG | 569 | spCas9 | Splice Site |
| | | | | | | MQKFRAER | |
| | | | | | | ABE | |
| Guide 4 | ATTACCAGGTAAAGTTCTTTTGC | 383 | TGC | AUUACCAGGUAAAGUUCUUU | 570 | spCas9 | Splice Site |
| | | | | | | MQKFRAER | |
| | | | | | | ABE | |
| Guide 5 | CAATTACCAATTTCTGAAAGGGC | 384 | GGC | CAAUUACCAAUUUCUGAAAG | 571 | spCas9 | Splice Site |
| | | | | | | MQKFRAER | |
| | | | | | | ABE | |
| Guide 6 | CACTTACCACAGGAAACTGTAGC | 385 | AGC | CACUUACCACAGGAAACUGU | 572 | spCas9 | Splice Site |
| | | | | | | MQKFRAER | |
| | | | | | | ABE | |
| Guide 7 | CATTTCACAAGGCAGAGTACCGG | 386 | CGG | CAUUUCACAAGGCAGAGUAC | 573 | spCas9 ABE | H158R, K159E |
| Guide 8 | ACTGTAAGGAAGAGAAGTAAAGG | 387 | AGG | ACUGUAAGGAAGAGAAGUAA | 574 | spCas9 ABE | K341G |
| Guide 9 | CTCTCCTAGGCTTCCCCTGCAGG | 388 | AGG | CUCUCCUAGGCUUCCCCUGC | 575 | spCas9 ABE | Splice Site |
| Guide 10 | GTGACTCAGGGAGATTCAGGTGG | 389 | TGG | GUGACUCAGGGAGAUUCAGG | 576 | spCas9 ABE | Splice Site |
| Guide 11 | TGAATCTCCCTGAGTCACAGTGG | 390 | TGG | UGAAUCUCCCUGAGUCACAG | 577 | spCas9 ABE | S578P |
| Guide 12 | TACATACCAGTGTAATTCAAAGG | 391 | AGG | UACAUACCAGUGUAAUUCAA | 578 | spCas9 ABE | Splice Site |
| Guide 13 | ACACTTACCCATCAAAGCAGTGG | 392 | TGG | ACACUUACCCAUCAAAGCAG | 579 | spCas9 ABE | Splice Site |
| Guide 14 | CACTTACCCATCAAAGCAGTGGG | 393 | GGG | CACUUACCCAUCAAAGCAGU | 580 | spCas9 ABE | Splice Site |
| Guide 15 | TACAATTACCAATTTCTGAAAGG | 394 | AGG | UACAAUUACCAAUUUCUGAA | 581 | spCas9 ABE | Splice Site |
| Guide 16 | ACAATTACCAATTTCTGAAAGGG | 395 | GGG | ACAAUUACCAAUUUCUGAAA | 582 | spCas9 ABE | Splice Site |
| Guide 17 | AAATAGGTTTGGTTGCTTCTTGA | 396 | TGA | AAAUAGGUUUGGUUGCUUCU | 583 | spCas9 VRQR | Splice Site |
| | | | | | | ABE | |
| Guide 18 | TCTTGTACAGCTTGCCATCGAGA | 397 | AGA | UCUUGUACAGCUUGCCAUCG | 584 | spCas9 VRQR | Splice Site |
| | | | | | | ABE | |
| Guide 19 | TTCACAAGGCAGAGTACCGGTGA | 398 | TGA | UUCACAAGGCAGAGUACCGG | 585 | spCas9 VRQR | H158R, K159G |
| | | | | | | ABE | |
| Guide 20 | CTGTAAGGAAGAGAAGTAAAGGA | 399 | GGA | CUGUAAGGAAGAGAAGUAAA | 586 | spCas9 VRQR | K341G, E342G |
| | | | | | | ABE | |
| Guide 21 | CTAGGTGTAAGTGTTTCTTAAGA | 400 | AGA | CUAGGUGUAAGUGUUUCUUA | 587 | spCas9 VRQR | Splice Site |
| | | | | | | ABE | |
| Guide 22 | TCTCCTAGGCTTCCCCTGCAGGA | 401 | GGA | UCUCCUAGGCUUCCCCUGCA | 588 | spCas9 VRQR | Splice Site |
| | | | | | | ABE | |
| Guide 23 | TCATGCTTACCTTTCTCCTTCGA | 402 | CGA | UCAUGCUUACCUUUCUCCUU | 589 | spCas9 VRQR | Splice Site |
| | | | | | | ABE | |
| Guide 24 | ATGCTTACCTTTCTCCTTCGAGA | 403 | AGA | AUGCUUACCUUUCUCCUUCG | 590 | spCas9 VRQR | Splice Site |
| | | | | | | ABE | |
| Guide 25 | ACATACCAGTGTAATTCAAAGGA | 404 | GGA | ACAUACCAGUGUAAUUCAAA | 591 | spCas9 VRQR | Splice Site |
| | | | | | | ABE | |
| Guide 26 | ACACTTACACCTAGATGAAATGA | 405 | TGA | ACACUUACACCUAGAUGAAA | 592 | spCas9 VRQR | C345R, C347R |
| | | | | | | ABE | |
| Guide 27 | TTACAGTCTTCTGGGAGTAAAGA | 406 | AGA | UUACAGUCUUCUGGGAGUAA | 593 | spCas9 VRQR | C340R |
| | | | | | | ABE | |
| Guide 28 | CTCACCGGTACTCTGCCTTGTGA | 407 | TGA | CUCACCGGUACUCUGCCUUG | 594 | spCas9 VRQR | Splice Site |
| | | | | | | ABE | |
| Guide 29 | ACAACTTACCACTTATTTGATGA | 408 | TGA | ACAACUUACCACUUAUUUGA | 595 | spCas9 VRQR | Splice Site |
| | | | | | | ABE | |
| Guide 30 | TTACCTTTTCTCCATGTCATTGA | 409 | TGA | UUACCUUUUCUCCAUGUCAU | 596 | spCas9 VRQR | Splice Site |
| | | | | | | ABE | |
| Guide 31 | ATTTCACAAGGCAGAGTACCGGTGAG | 410 | GTGAG | AUUUCACAAGGCAGAGUACC | 597 | saCas9 ABE | H158R, K159G |
| | T | | T | G | | | |
| Guide 32 | TCACTGCTGCCCACTGCTTTGATGGG | 411 | ATGGG | UCACUGCUGCCCACUGCUUU | 598 | saCas9 ABE | H434R |
| | T | | T | G | | | |
| Guide 33 | TTCTCTCCTAGGCTTCCCCTGCAGGA | 412 | CAGGA | UUCUCUCCUAGGCUUCCCCU | 599 | saCas9 ABE | Splice Site |
| | T | | T | G | | | |
| Guide 34 | TTCTCTTCCTTACAGTCTTCTGGGAG | 413 | GGGAG | UUCUCUUCCUUACAGUCUUC | 600 | saCas9 ABE | C340R |
| | T | | T | U | | | |
| Guide 35 | CCTTACAGTCTTCTGGGAGTAAAGAA | 414 | AAGAA | CCUUACAGUCUUCUGGGAGU | 601 | saCas9 ABE | C340R |
| | T | | T | A | | | |
| Guide 36 | TCATCAAATAAGTGGTAAGTTGTGAA | 415 | GTGAA | UCAUCAAAUAAGUGGUAAGU | 602 | saCas9 CBE | Stop Codon |
| | T | | T | U | | | |
| Guide 37 | TTGCCATCGAGACATTTATAAAGGAG | 416 | AGGAG | UUGCCAUCGAGACAUUUAUA | 603 | saCas9 CBE | Stop Codon |
| | T | | T | A | | | |
| Guide 38 | CCACGCAAACATTTCACAAGGCAGAG | 417 | CAGAG | CCACGCAAACAUUUCACAAG | 604 | saCas9 CBE | Stop Codon |
| | T | | T | G | | | |
| Guide 39 | ATTTCACAAGGCAGAGTACCGGTGAG | 418 | GTGAG | AUUUCACAAGGCAGAGUACC | 605 | saCas9 CBE | H158Y, A160V |
| | T | | T | G | | | |
| Guide 40 | CTCCTCAAGAAAACACCATATCTGGA | 419 | CTGGA | CUCCUCAAGAAAACACCAUA | 606 | saCas9 CBE | Stop Codon |
| | T | | T | U | | | |
| Guide 41 | CAGCTCAGAGGCACCTGTGTGGAGGG | 420 | GAGGG | CAGCUCAGAGGCACCUGUGU | 607 | saCas9 CBE | Stop Codon |
| | T | | T | G | | | |
| Guide 42 | TCACTGCTGCCCACTGCTTTGATGGG | 421 | ATGGG | UCACUGCUGCCCACUGCUUU | 608 | saCas9 CBE | T431I, A432V, A433V, |
| | T | | T | G | | | H434Y |
| Guide 43 | GTGAGGACCCACTGGTGTCCTATGAG | 422 | ATGAG | GUGAGGACCCACUGGUGUCC | 609 | saCas9 CBE | Stop Codon |
| | T | | T | U | | | |
| Guide 44 | GCCAGGGCCACTCTCCCCAAGAAGAG | 423 | AAGAG | GCCAGGGCCACUCUCCCCAA | 610 | saCas9 CBE | Stop Codon |
| | T | | T | G | | | |
| Guide 45 | CCTTACAGTCTTCTGGGAGTAAAGAA | 424 | AAGAA | CCUUACAGUCUUCUGGGAGU | 611 | saCas9 CBE | D339N, C340Y |
| | T | | T | A | | | |
| Guide 46 | CTTCTCCTCCAAAGTCAACTCCCGGG | 425 | CCGGG | CUUCUCCUCCAAAGUCAACU | 612 | saCas9 CBE | G303K, G304K, E305K |
| | T | | T | | | | |
| Guide 47 | TCGATTTTCCATACATTTGTATAGAA | 426 | TAGAA | UCGAUUUUCCAUACAUUUGU | 613 | saCas9 CBE | Stop Codon |
| | T | | T | A | | | |
| gRNA1079 | CAAATGCCCAATACTGCCAGATGAGG | 427 | TGAGG | CAAAUGCCCAAUACUGCCAG | 614 | saCas9 KKH | Stop Codon |
| | T | | T | A | | CBE | |
| gRNA1082 | TTCCTTGAAGCAATGTGGTCATCAAA | 428 | TCAAA | UUCCUUGAAGCAAUGUGGUC | 615 | saCas9 KKH | Stop Codon |
| | T | | T | A | | CBE | |
| gRNA1083 | TTGAAGCAATGTGGTCATCAAATAAG | 429 | ATAAG | UUGAAGCAAUGUGGUCAUCA | 616 | saCas9 KKH | Stop Codon |
| | T | | T | A | | CBE | |
| gRNA1084 | AAGCAATGTGGTCATCAAATAAGTGG | 430 | AGTGG | AAGCAAUGUGGUCAUCAAAU | 617 | saCas9 KKH | Stop Codon |
| | T | | T | A | | CBE | |
| gRNA1085 | AATGTGGTCATCAAATAAGTGGTAAG | 431 | GTAAG | AAUGUGGUCAUCAAAUAAGU | 618 | saCas9 KKH | Stop Codon |
| | T | | T | G | | CBE | |
| gRNA1086 | TCATCAAATAAGTGGTAAGTTGTGAA | 432 | GTGAA | UCAUCAAAUAAGUGGUAAGU | 619 | saCas9 KKH | Stop Codon |
| | T | | T | U | | CBE | |
| gRNA1091 | TTGCCATCGAGACATTTATAAAGGAG | 433 | AGGAG | UUGCCAUCGAGACAUUUAUA | 620 | saCas9 KKH | Stop Codon |
| | T | | T | A | | CBE | |
| gRNA1092 | CATCGAGACATTTATAAAGGAGTTGA | 434 | GTTGA | CAUCGAGACAUUUAUAAAGG | 621 | saCas9 KKH | Stop Codon |
| | T | | T | A | | CBE | |
| gRNA1094 | GAAGAATGCCAAAAAAGGTGCACCAG | 435 | ACCAG | GAAGAAUGCCAAAAAAGGUG | 622 | saCas9 KKH | Stop Codon |
| | T | | T | C | | CBE | |
| gRNA1095 | CCACGCAAACATTTCACAAGGCAGAG | 436 | CAGAG | CCACGCAAACAUUUCACAAG | 623 | saCas9 KKH | Stop Codon |
| | T | | T | G | | CBE | |
| Guide 58 | ATTTCACAAGGCAGAGTACCGGTGAG | 437 | GTGAG | AUUUCACAAGGCAGAGUACC | 624 | saCas9 KKH | H158Y, A160V |
| | T | | T | G | | CBE | |
| gRNA1103 | ACAAGGCAGAGTACCGGTGAGTACAA | 438 | TACAA | ACAAGGCAGAGUACCGGUGA | 625 | saCas9 KKH | A160V |
| | T | | T | G | | CBE | |
| gRNA1111 | ATCTTCCAGCATCTTGCGTTCTCAGA | 439 | TCAGA | AUCUUCCAGCAUCUUGCGUU | 626 | saCas9 KKH | Stop Codon |
| | T | | T | C | | CBE | |
| Guide 61 | TCACAAAGGCGAGTATGCATGGAAAA | 440 | GAAAA | UCACAAAGGCGAGUAUGCAU | 627 | saCas9 KKH | Splice Site, Stop |
| | T | | T | G | | CBE | Codon |
| gRNA1113 | CTCCTCAAGAAAACACCATATCTGGA | 441 | CTGGA | CUCCUCAAGAAAACACCAUA | 628 | saCas9 KKH | Stop Codon |
| | T | | T | U | | CBE | |
| gRNA1121 | TGTTTGCCAAGAGACTTGCACAAAGA | 442 | AAAGA | UGUUUGCCAAGAGACUUGCA | 629 | saCas9 KKH | Stop Codon |
| | T | | T | C | | CBE | |
| gRNA1122 | TTGCCAAGAGACTTGCACAAAGATGA | 443 | GATGA | UUGCCAAGAGACUUGCACAA | 630 | saCas9 KKH | Stop Codon |
| | T | | T | A | | CBE | |
| gRNA1128 | TCCCAGAAGACTGTAAGGAAGAGAAG | 444 | AGAAG | UCCCAGAAGACUGUAAGGAA | 631 | saCas9 KKH | P337L |
| | T | | T | G | | CBE | |
| Guide 66 | GTGGCCCTGGCAGGTGAGCCTGCAGG | 445 | GCAGG | GUGGCCCUGGCAGGUGAGCC | 632 | saCas9 KKH | Stop Codon |
| | T | | T | U | | CBE | |
| gRNA1144 | CAGCTCAGAGGCACCTGTGTGGAGGG | 446 | GAGGG | CAGCUCAGAGGCACCUGUGU | 633 | saCas9 KKH | Stop Codon |
| | T | | T | G | | CBE | |
| Guide 68 | TCACTGCTGCCCACTGCTTTGATGGG | 447 | ATGGG | UCACUGCUGCCCACUGCUUU | 634 | saCas9 KKH | T431I, A432V, A433V, |
| | T | | T | G | | CBE | H434Y |
| Guide 69 | TGCTGCCCACTGCTTTGATGGGTAAG | 448 | GTAAG | UGCUGCCCACUGCUUUGAUG | 635 | saCas9 KKH | A432V, A433V, H434Y |
| | T | | T | G | | CBE | |
| gRNA1154 | CTGCAGGATGTTTGGCGCATCTATAG | 449 | TATAG | CUGCAGGAUGUUUGGCGCAU | 636 | saCas9 KKH | Stop Codon |
| | T | | T | C | | CBE | |
| gRNA1156 | CTCCAGGCTCCTTTGAATTACACTGG | 450 | ACTGG | CUCCAGGCUCCUUUGAAUUA | 637 | saCas9 KKH | Stop Codon |
| | T | | T | C | | CBE | |
| Guide 72 | TGAAATCCAAAATATTCTACAAAAGG | 451 | AAAGG | UGAAAUCCAAAAUAUUCUAC | 638 | saCas9 KKH | Stop Codon |
| | T | | T | A | | CBE | |
| Guide 73 | ATCCAAAATATTCTACAAAAGGTAAA | 452 | GTAAA | AUCCAAAAUAUUCUACAAAA | 639 | saCas9 KKH | Stop Codon |
| | T | | T | G | | CBE | |
| gRNA1169 | TCTACAAAAGGTAAATATTCCTTTGG | 453 | TTTGG | UCUACAAAAGGUAAAUAUUC | 640 | saCas9 KKH | Stop Codon |
| | T | | T | C | | CBE | |
| gRNA1170 | GAAGAATGCCAGAAAAGATATCAAGA | 454 | CAAGA | GAAGAAUGCCAGAAAAGAUA | 641 | saCas9 KKH | Stop Codon |
| | T | | T | U | | CBE | |
| Guide 76 | TCAGGGAGATTCAGGTGGTCCCTTAG | 455 | CTTAG | UCAGGGAGAUUCAGGUGGUC | 642 | saCas9 KKH | S578L |
| | T | | T | C | | CBE | |
| gRNA1179 | GGAGCAACCTGGTGTCTACACCAAAG | 456 | CAAAG | GGAGCAACCUGGUGUCUACA | 643 | saCas9 KKH | Stop Codon |
| | T | | T | C | | CBE | |
| gRNA1180 | GATGCAGTCACCAGCATGAGAAGCAG | 457 | AGCAG | GAUGCAGUCACCAGCAUGAG | 644 | saCas9 KKH | Stop Codon |
| | T | | T | A | | CBE | |
| gRNA1172 | AATCTCCCTGAGTCACAGTGGAAAAA | 458 | AAAAA | AAUCUCCCUGAGUCACAGUG | 645 | saCas9 KKH | Splice Site |
| | T | | T | G | | CBE | |
| gRNA1171 | CCCTGAGTCACAGTGGAAAAATAAAA | 459 | TAAAA | CCCUGAGUCACAGUGGAAAA | 646 | saCas9 KKH | Splice Site |
| | T | | T | A | | CBE | |
| gRNA1165 | AGAAGCCCCATCCGGTTACCCAACAG | 460 | AACAG | AGAAGCCCCAUCCGGUUACC | 647 | saCas9 KKH | Stop Codon |
| | T | | T | C | | CBE | |
| gRNA1164 | GCCCCATCCGGTTACCCAACAGTTGG | 461 | GTTGG | GCCCCAUCCGGUUACCCAAC | 648 | saCas9 KKH | Stop Codon |
| | T | | T | A | | CBE | |
| gRNA1163 | TCCGGTTACCCAACAGTTGGTATAAA | 462 | ATAAA | UCCGGUUACCCAACAGUUGG | 649 | saCas9 KKH | Stop Codon |
| | T | | T | U | | CBE | |
| gRNA1160 | TGGAATTCTGAAACATAATTTTTAAA | 463 | TTAAA | UGGAAUUCUGAAACAUAAUU | 650 | saCas9 KKH | Splice Site |
| | T | | T | U | | CBE | |
| gRNA1152 | GGGGAAGCCTAGGAGAGAAAAATAAA | 464 | ATAAA | GGGGAAGCCUAGGAGAGAAA | 651 | saCas9 KKH | Splice Site |
| | T | | T | A | | CBE | |
| gRNA1147 | TTACCCATCAAAGCAGTGGGCAGCAG | 465 | AGCAG | UUACCCAUCAAAGCAGUGGG | 652 | saCas9 KKH | Splice Site |
| | T | | T | C | | CBE | |
| gRNA1145 | GTGAGGACCCACTGGTGTCCTATGAG | 466 | ATGAG | GUGAGGACCCACUGGUGUCC | 653 | saCas9 KKH | Stop Codon |
| | T | | T | U | | CBE | |
| gRNA1143 | GCCAGGGCCACTCTCCCCAAGAAGAG | 467 | AAGAG | GCCAGGGCCACUCUCCCCAA | 654 | saCas9 KKH | Stop Codon |
| | T | | T | G | | CBE | |
| gRNA1140 | GACTGAAAAGAGAGCGTTGACGCTAA | 468 | GCTAA | GACUGAAAAGAGAGCGUUGA | 655 | saCas9 KKH | Splice Site |
| | T | | T | C | | CBE | |
| Guide 90 | AGGTTACTCACCAGAGTTGTCCCCAG | 469 | CCCAG | AGGUUACUCACCAGAGUUGU | 656 | saCas9 KKH | Splice Site |
| | T | | T | C | | CBE | |
| Guide 91 | CACTTACACCTAGATGAAATGAACAG | 470 | AACAG | CACUUACACCUAGAUGAAAU | 657 | saCas9 KKH | Splice Site, Missense |
| | T | | T | G | | CBE | |
| Guide 92 | ATTTCCTTTACTTCTCTTCCTTACAG | 471 | TACAG | AUUUCCUUUACUUCUCUUCC | 658 | saCas9 KKH | Splice Site |
| | T | | T | U | | CBE | |
| Guide 93 | CCTTACAGTCTTCTGGGAGTAAAGAA | 472 | AAGAA | CCUUACAGUCUUCUGGGAGU | 659 | saCas9 KKH | D339N, C340Y |
| | T | | T | A | | CBE | |
| gRNA1120 | ACTCCTTTAACAAAAGTCACATTCAA | 473 | TTCAA | ACUCCUUUAACAAAAGUCAC | 660 | saCas9 KKH | V312I, G314K |
| | T | | T | A | | CBE | |
| gRNA1119 | CTTCTCCTCCAAAGTCAACTCCCGGG | 474 | CCGGG | CUUCUCCUCCAAAGUCAACU | 661 | saCas9 KKH | G303K, G304K, E305K |
| | T | | T | C | | CBE | |
| gRNA1118 | TCCTCCAAAGTCAACTCCCGGGTAAA | 475 | GTAAA | UCCUCCAAAGUCAACUCCCG | 662 | saCas9 KKH | D301N, G303K, G304R |
| | T | | T | G | | CBE | |
| gRNA1114 | ATTACCAGGTAAAGTTCTTTTGCAGG | 476 | GCAGG | AUUACCAGGUAAAGUUCUUU | 663 | saCas9 KKH | Splice Site |
| | T | | T | U | | CBE | |
| gRNA1112 | TCGATTTTCCATACATTTGTATAGAA | 477 | TAGAA | UCGAUUUUCCAUACAUUUGU | 664 | saCas9 KKH | Stop Codon |
| | T | | T | A | | CBE | |
| gRNA1110 | CAACCTGTGAACTCACAGAGAGAAGA | 478 | GAAGA | CAACCUGUGAACUCACAGAG | 665 | saCas9 KKH | Splice Site |
| | T | | T | A | | CBE | |
| gRNA1105 | TTGTTCCTGAATGGGAAGAAAAGAGG | 479 | AGAGG | UUGUUCCUGAAUGGGAAGAA | 666 | saCas9 KKH | Splice Site |
| | T | | T | A | | CBE | |
| Guide 101 | ACTCACCGGTACTCTGCCTTGTGAAA | 480 | TGAAA | ACUCACCGGUACUCUGCCUU | 667 | saCas9 KKH | Splice Site |
| | T | | T | G | | CBE | |
| gRNA1093 | TCCTCTCATATCAACTCCTTTATAAA | 481 | ATAAA | UCCUCUCAUAUCAACUCCUU | 668 | saCas9 KKH | D120N, M121I, R122K, |
| | T | | T | U | | CBE | G123R |
| Guide 103 | CTTTTACCTTTTCTCCATGTCATTGA | 482 | ATTGA | CUUUUACCUUUUCUCCAUGU | 669 | saCas9 KKH | Splice Site |
| | T | | T | C | | CBE | |
| gRNA1077 | GACATCCTGTGACAGAACCATAAAAA | 483 | AAAAA | GACAUCCUGUGACAGAACCA | 670 | saCas9 KKH | Splice Site |
| | T | | T | U | | CBE | |
| gRNA1076 | TCCTGTGACAGAACCATAAAAATTAA | 484 | ATTAA | UCCUGUGACAGAACCAUAAA | 671 | saCas9 KKH | Splice Site |
| | T | | T | A | | CBE | |
| gRNA1096 | AAACATTTCACAAGGCAGAGTACCGG | 485 | ACCGG | AAACAUUUCACAAGGCAGAG | 672 | saCas9 KKH | H158R, K159G |
| | T | | T | U | | ABE | |
| gRNA1098 | ATTTCACAAGGCAGAGTACCGGTGAG | 486 | GTGAG | AUUUCACAAGGCAGAGUACC | 673 | saCas9 KKH | H158R, K159G |
| | T | | T | G | | ABE | |
| gRNA1107 | CATTCAGGAACAATTGCCTATTAAAG | 487 | TAAAG | CAUUCAGGAACAAUUGCCUA | 674 | saCas9 KKH | Splice Site |
| | T | | T | U | | ABE | |
| gRNA1117 | TGACACAGAACCCTGCCATTCTAAAA | 488 | TAAAA | UGACACAGAACCCUGCCAUU | 675 | saCas9 KKH | Splice Site |
| | T | | T | C | | ABE | |
| gRNA1131 | ACTGTAAGGAAGAGAAGTAAAGGAAA | 489 | GGAAA | ACUGUAAGGAAGAGAAGUAA | 676 | saCas9 KKH | K341G, E342G, E343G |
| | T | | T | A | | ABE | |
| gRNA1137 | CATCTAGGTGTAAGTGTTTCTTAAGA | 490 | TAAGA | CAUCUAGGUGUAAGUGUUUC | 677 | saCas9 KKH | Splice Site |
| | T | | T | U | | ABE | |
| gRNA1146 | TCACTGCTGCCCACTGCTTTGATGGG | 491 | ATGGG | UCACUGCUGCCCACUGCUUU | 678 | saCas9 KKH | H434R |
| | T | | T | G | | ABE | |
| gRNA1149 | TGCTGCCCACTGCTTTGATGGGTAAG | 492 | GTAAG | UGCUGCCCACUGCUUUGAUG | 679 | saCas9 KKH | H434R |
| | T | | T | G | | ABE | |
| gRNA1153 | TTCTCTCCTAGGCTTCCCCTGCAGGA | 493 | CAGGA | UUCUCUCCUAGGCUUCCCCU | 680 | saCas9 KKH | Splice Site |
| | T | | T | G | | ABE | |
| gRNA1162 | TTATGTTTCAGAATTCCAAAAACCAA | 494 | ACCAA | UUAUGUUUCAGAAUUCCAAA | 681 | saCas9 KKH | Splice Site |
| | T | | T | A | | ABE | |
| gRNA1167 | TGGTTACTCACAGGTGAAATCCAAAA | 495 | CAAAA | UGGUUACUCACAGGUGAAAU | 682 | saCas9 KKH | Splice Site |
| | T | | T | C | | ABE | |
| gRNA1173 | TCCACTGTGACTCAGGGAGATTCAGG | 496 | TCAGG | UCCACUGUGACUCAGGGAGA | 683 | saCas9 KKH | Splice Site |
| | T | | T | U | | ABE | |
| gRNA1177 | ACTGTGACTCAGGGAGATTCAGGTGG | 497 | GGTGG | ACUGUGACUCAGGGAGAUUC | 684 | saCas9 KKH | Splice Site |
| | T | | T | A | | ABE | |
| gRNA1176 | ACCACCTGAATCTCCCTGAGTCACAG | 498 | CACAG | ACCACCUGAAUCUCCCUGAG | 685 | saCas9 KKH | S578P |
| | T | | T | U | | ABE | |
| Guide 120 | CATCCAACACTTACCCATCAAAGCAG | 499 | AGCAG | CAUCCAACACUUACCCAUCA | 686 | saCas9 KKH | Splice Site |
| | T | | T | A | | ABE | |
| gRNA1139 | AGGTTACTCACCAGAGTTGTCCCCAG | 500 | CCCAG | AGGUUACUCACCAGAGUUGU | 687 | saCas9 KKH | Splice Site |
| | T | | T | C | | ABE | |
| gRNA1134 | CACTTACACCTAGATGAAATGAACAG | 501 | AACAG | CACUUACACCUAGAUGAAAU | 688 | saCas9 KKH | C345R |
| | T | | T | G | | ABE | |
| gRNA1130 | ATTTCCTTTACTTCTCTTCCTTACAG | 502 | TACAG | AUUUCCUUUACUUCUCUUCC | 689 | saCas9 KKH | Splice Site |
| | T | | T | U | | ABE | |
| gRNA1126 | TTCTCTTCCTTACAGTCTTCTGGGAG | 503 | GGGAG | UUCUCUUCCUUACAGUCUUC | 690 | saCas9 KKH | C340R |
| | T | | T | U | | ABE | |
| gRNA1123 | CCTTACAGTCTTCTGGGAGTAAAGAA | 504 | AAGAA | CCUUACAGUCUUCUGGGAGU | 691 | saCas9 KKH | C340R |
| | T | | T | A | | ABE | |
| gRNA1099 | ACTCACCGGTACTCTGCCTTGTGAAA | 505 | TGAAA | ACUCACCGGUACUCUGCCUU | 692 | saCas9 KKH | Splice Site |
| | T | | T | G | | ABE | |
| gRNA1087 | AAATTCACAACTTACCACTTATTTGA | 506 | TTTGA | AAAUUCACAACUUACCACUU | 693 | saCas9 KKH | Splice Site |
| | T | | T | A | | ABE | |
| gRNA1080 | CTTTTACCTTTTCTCCATGTCATTGA | 507 | ATTGA | CUUUUACCUUUUCUCCAUGU | 694 | saCas9 KKH | Splice Site |
| | T | | T | C | | ABE | |
| gRNA1097 | CATTTCACAAGGCAGAGTACCGG | 508 | CGG | CAUUUCACAAGGCAGAGUAC | 695 | spCas9 IBE | H158R, K159G |
| gRNA1129 | ACTGTAAGGAAGAGAAGTAAAGG | 509 | AGG | ACUGUAAGGAAGAGAAGUAA | 696 | spCas9 IBE | K341G, E342G |
| Guide 131 | ACTGCTGCCCACTGCTTTGATGG | 510 | TGG | ACUGCUGCCCACUGCUUUGA | 697 | spCas9 IBE | H434R |
| gRNA1148 | CTGCTGCCCACTGCTTTGATGGG | 511 | GGG | CUGCUGCCCACUGCUUUGAU | 698 | spCas9 IBE | H434R |
| Guide 133 | CTCTCCTAGGCTTCCCCTGCAGG | 512 | AGG | CUCUCCUAGGCUUCCCCUGC | 699 | spCas9 IBE | Splice Site |
| gRNA1175 | ACTGTGACTCAGGGAGATTCAGG | 513 | AGG | ACUGUGACUCAGGGAGAUUC | 700 | spCas9 IBE | Splice Site |
| gRNA1178 | GTGACTCAGGGAGATTCAGGTGG | 514 | TGG | GUGACUCAGGGAGAUUCAGG | 701 | spCas9 IBE | Splice Site |
| gRNA1174 | TGAATCTCCCTGAGTCACAGTGG | 515 | TGG | UGAAUCUCCCUGAGUCACAG | 702 | spCas9 IBE | S578P |
| gRNA1159 | TACATACCAGTGTAATTCAAAGG | 516 | AGG | UACAUACCAGUGUAAUUCAA | 703 | spCas9 IBE | Splice Site |
| Guide 138 | ACACTTACCCATCAAAGCAGTGG | 517 | TGG | ACACUUACCCAUCAAAGCAG | 704 | spCas9 IBE | Splice Site |
| gRNA1151 | CACTTACCCATCAAAGCAGTGGG | 518 | GGG | CACUUACCCAUCAAAGCAGU | 705 | spCas9 IBE | Splice Site |
| Guide 140 | TACAATTACCAATTTCTGAAAGG | 519 | AGG | UACAAUUACCAAUUUCUGAA | 706 | spCas9 IBE | Splice Site |
| Guide 141 | ACAATTACCAATTTCTGAAAGGG | 520 | GGG | ACAAUUACCAAUUUCUGAAA | 707 | spCas9 IBE | Splice Site |
| Guide 142 | ACTTTTAAAATAGGTTTGGTTGC | 521 | TGC | ACUUUUAAAAUAGGUUUGGU | 708 | spCas9 | Splice Site |
| | | | | | | MQKFRAER | |
| | | | | | | IBE | |
| Guide 143 | TCTTCCCATTCAGGAACAATTGC | 522 | TGC | UCUUCCCAUUCAGGAACAAU | 709 | spCas9 | Splice Site |
| | | | | | | MQKFRAER | |
| | | | | | | IBE | |
| Guide 144 | TTTCTCTCCTAGGCTTCCCCTGC | 523 | TGC | UUUCUCUCCUAGGCUUCCCC | 710 | spCas9 | Splice Site |
| | | | | | | MQKFRAER | |
| | | | | | | IBE | |
| Guide 145 | CTTACCTTTCTCCTTCGAGAAGC | 524 | AGC | CUUACCUUUCUCCUUCGAGA | 711 | spCas9 | Splice Site |
| | | | | | | MQKFRAER | |
| | | | | | | IBE | |
| gRNA1157 | ATACCAGTGTAATTCAAAGGAGC | 525 | AGC | AUACCAGUGUAAUUCAAAGG | 712 | spCas9 | Splice Site |
| | | | | | | MQKFRAER | |
| | | | | | | IBE | |
| Guide 147 | ATCCAACACTTACCCATCAAAGC | 526 | AGC | AUCCAACACUUACCCAUCAA | 713 | spCas9 | Splice Site |
| | | | | | | MQKFRAER | |
| | | | | | | IBE | |
| gRNA1150 | ACTTACCCATCAAAGCAGTGGGC | 527 | GGC | ACUUACCCAUCAAAGCAGUG | 714 | spCas9 | Splice Site |
| | | | | | | MQKFRAER | |
| | | | | | | IBE | |
| gRNA1115 | ATTACCAGGTAAAGTTCTTTTGC | 528 | TGC | AUUACCAGGUAAAGUUCUUU | 715 | spCas9 | Splice Site |
| | | | | | | MQKFRAER | |
| | | | | | | IBE | |
| gRNA1108 | CAATTACCAATTTCTGAAAGGGC | 529 | GGC | CAAUUACCAAUUUCUGAAAG | 716 | spCas9 | Splice Site |
| | | | | | | MQKFRAER | |
| | | | | | | IBE | |
| gRNA1104 | AATTGTACTCACCGGTACTCTGC | 530 | TGC | AAUUGUACUCACCGGUACUC | 717 | spCas9 | Splice Site |
| | | | | | | MQKFRAER | |
| | | | | | | IBE | |
| gRNA1074 | CACTTACCACAGGAAACTGTAGC | 531 | AGC | CACUUACCACAGGAAACUGU | 718 | spCas9 | Splice Site |
| | | | | | | MQKFRAER | |
| | | | | | | IBE | |
| Guide 153 | AAATAGGTTTGGTTGCTTCTTGA | 532 | TGA | AAAUAGGUUUGGUUGCUUCU | 719 | spCas9 VRQR | Splice Site |
| | | | | | | IBE | |
| gRNA1090 | TTTCTTGTACAGCTTGCCATCGA | 533 | CGA | UUUCUUGUACAGCUUGCCAU | 720 | spCas9 VRQR | Splice Site |
| | | | | | | IBE | |
| Guide 155 | TCTTGTACAGCTTGCCATCGAGA | 534 | AGA | UCUUGUACAGCUUGCCAUCG | 721 | spCas9 VRQR | Splice Site |
| | | | | | | IBE | |
| gRNA1101 | TTCACAAGGCAGAGTACCGGTGA | 535 | TGA | UUCACAAGGCAGAGUACCGG | 722 | spCas9 VRQR | H158R, K159G |
| | | | | | | IBE | |
| Guide 157 | TGAGTTCACAGGTTGCCACATGA | 536 | TGA | UGAGUUCACAGGUUGCCACA | 723 | spCas9 VRQR | Splice Site |
| | | | | | | IBE | |
| gRNA1132 | CTGTAAGGAAGAGAAGTAAAGGA | 537 | GGA | CUGUAAGGAAGAGAAGUAAA | 724 | spCas9 VRQR | K341G, E342G, E343G |
| | | | | | | IBE | |
| gRNA1138 | CTAGGTGTAAGTGTTTCTTAAGA | 538 | AGA | CUAGGUGUAAGUGUUUCUUA | 725 | spCas9 VRQR | Splice Site |
| | | | | | | IBE | |
| gRNA1141 | CAAGCACACGCATTGTTGGAGGA | 539 | GGA | CAAGCACACGCAUUGUUGGA | 726 | spCas9 VRQR | S388G, T389A, I391V |
| | | | | | | IBE | |
| Guide 161 | TCTCCTAGGCTTCCCCTGCAGGA | 540 | GGA | UCUCCUAGGCUUCCCCUGCA | 727 | spCas9 VRQR | Splice Site |
| | | | | | | IBE | |
| gRNA1155 | AGGGAATCATGATATCGCCTTGA | 541 | TGA | AGGGAAUCAUGAUAUCGCCU | 728 | spCas9 VRQR | N481G, H482R, D483G |
| | | | | | | IBE | |
| gRNA1166 | TCATGCTTACCTTTCTCCTTCGA | 542 | CGA | UCAUGCUUACCUUUCUCCUU | 729 | spCas9 VRQR | Splice Site |
| | | | | | | IBE | |
| Guide 164 | ATGCTTACCTTTCTCCTTCGAGA | 543 | AGA | AUGCUUACCUUUCUCCUUCG | 730 | spCas9 VRQR | Splice Site |
| | | | | | | IBE | |
| gRNA1158 | ACATACCAGTGTAATTCAAAGGA | 544 | GGA | ACAUACCAGUGUAAUUCAAA | 731 | spCas9 VRQR | Splice Site |
| | | | | | | IBE | |
| gRNA1135 | ACACTTACACCTAGATGAAATGA | 545 | TGA | ACACUUACACCUAGAUGAAA | 732 | spCas9 VRQR | C345R, C347R |
| | | | | | | IBE | |
| gRNA1127 | CTCTTCCTTACAGTCTTCTGGGA | 546 | GGA | CUCUUCCUUACAGUCUUCUG | 733 | spCas9 VRQR | C340R |
| | | | | | | IBE | |
| gRNA1124 | TTACAGTCTTCTGGGAGTAAAGA | 547 | AGA | UUACAGUCUUCUGGGAGUAA | 734 | spCas9 VRQR | C340R |
| | | | | | | IBE | |
| gRNA1109 | GTCCTACAATTACCAATTTCTGA | 548 | TGA | GUCCUACAAUUACCAAUUUC | 735 | spCas9 VRQR | Splice Site |
| | | | | | | IBE | |
| gRNA1102 | CTCACCGGTACTCTGCCTTGTGA | 549 | TGA | CUCACCGGUACUCUGCCUUG | 736 | spCas9 VRQR | Splice Site |
| | | | | | | IBE | |
| gRNA1088 | TTCACAACTTACCACTTATTTGA | 550 | TGA | UUCACAACUUACCACUUAUU | 737 | spCas9 VRQR | Splice Site |
| | | | | | | IBE | |
| Guide 186 | ACAACTTACCACTTATTTGATGA | 551 | TGA | ACAACUUACCACUUAUUUGA | 738 | spCas9 VRQR | Splice Site |
| | | | | | | IBE | |
| Guide 173 | TTACCTTTTCTCCATGTCATTGA | 552 | TGA | UUACCUUUUCUCCAUGUCAU | 739 | spCas9 VRQR | Splice Site |
| | | | | | | IBE | |
| gRNA1078 | GTTCTGTCACAGGATGTCTGACTC | 553 | GTTC | UGUCACAGGAUGUCUGACUC | 740 | cas12b ABE | Splice Site |
| gRNA1081 | CTTTTAAAATAGGTTTGGTTGCTT | 554 | CTTT | UAAAAUAGGUUUGGUUGCUU | 741 | cas12b ABE | Splice Site |
| gRNA1100 | ATTTCACAAGGCAGAGTACCGGTG | 555 | ATTT | CACAAGGCAGAGUACCGGUG | 742 | cas12b ABE | K159R |
| gRNA1106 | CTTCCCATTCAGGAACAATTGCCT | 556 | CTTC | CCAUUCAGGAACAAUUGCCU | 743 | cas12b ABE | Splice Site |
| gRNA1116 | ATTGACACAGAACCCTGCCATTCT | 557 | ATTG | ACACAGAACCCUGCCAUUCU | 744 | cas12b ABE | Splice Site |
| gRNA1136 | ATTTCATCTAGGTGTAAGTGTTTC | 558 | ATTT | CAUCUAGGUGUAAGUGUUUC | 745 | cas12b ABE | Splice Site |
| gRNA1161 | ATTATGTTTCAGAATTCCAAAAAC | 559 | ATTA | UGUUUCAGAAUUCCAAAAAC | 746 | cas12b ABE | Splice Site |
| gRNA1168 | GTTACTCACAGGTGAAATCCAAAA | 560 | GTTA | CUCACAGGUGAAAUCCAAAA | 747 | cas12b ABE | Splice Site |
| gRNA1142 | GTTCCTCCAACAATGCGTGTGCTT | 561 | GTTC | CUCCAACAAUGCGUGUGCUU | 748 | cas12b ABE | I391T, V392A |
| gRNA1133 | ATTTCCTTTACTTCTCTTCCTTAC | 562 | ATTT | CCUUUACUUCUCUUCCUUAC | 749 | cas12b ABE | Splice Site |
| gRNA1125 | CTTCCTTACAGTCTTCTGGGAGTA | 563 | CTTC | CUUACAGUCUUCUGGGAGUA | 750 | cas12b ABE | C340R |
| Guide 185 | ATTGTACTCACCGGTACTCTGCCT | 564 | ATTG | UACUCACCGGUACUCUGCCU | 751 | cas12b ABE | Splice Site |
| gRNA1089 | ATTCACAACTTACCACTTATTTGA | 565 | ATTC | ACAACUUACCACUUAUUUGA | 752 | cas12b ABE | Splice Site |
| gRNA1075 | ATTCACTTACCACAGGAAACTGTA | 566 | ATTC | ACUUACCACAGGAAACUGUA | 753 | cas12b ABE | Splice Site |

TABLE 1B
Exemplary guide polynucleotide sequences and spacers, where spacer sequences
are in plan text and scaffold sequences are in bold. In Table 1B, mN = 2′-OMe; and Ns =
phosphorothioate (PS), where “N” represents the any nucleotide, as would be understood
by one having skill in the art. In some cases, a nucleotide (N) may contain two
modifications, for example, both a 2′-OMe and a PS modification. For example, a
nucleotide with a phosphorothioate and 2′ OMe is denoted as “mNs;” when there are two
modifications next to each other, the notation is “mNsmNs.

| | | | SEQ |
|---|---|---|---|
| Guide | Alternative | | ID |
| Name | Guide Name | Guide RNA Sequence | NO |
| gRNA1074 | TSBTx3498 | mCsmAsmCsUUACCACAGGAAACUGUGUUUUAGAG | 754 |
| | | CUAGAAAUAGCAAGUUAAAAUAAGGCUAGUCCGUU | |
| | | AUCAACUUGAAAAAGUGGCACCGAGUCGGUGCUsm | |
| | | UsmUsmU | |
| gRNA1075 | TSBTx3499 | mGsmUsmUsCUGUCUUUUGGUCAGGACAACCGUCU | 755 |
| | | AGCUAUAAGUGCUGCAGGGUGUGAGAAACUCCUAU | |
| | | UGCUGGACGAUGUCUCUUACGAGGCAUUAGCACAC | |
| | | UUACCACAGGAAACUsmGsmUsmA | |
| gRNA1076 | TSBTx3500 | mUsmCsmCsUGUGACAGAACCAUAAAAGUUUUAGU | 756 |
| | | ACUCUGUAAUGAAAAUUACAGAAUCUACUAAAACA | |
| | | AGGCAAAAUGCCGUGUUUAUCUCGUCAACUUGUUG | |
| | | GCGAGAUsmUsmUsmU | |
| gRNA1077 | TSBTx3501 | mGsmAsmCsAUCCUGUGACAGAACCAUGUUUUAGU | 757 |
| | | ACUCUGUAAUGAAAAUUACAGAAUCUACUAAAACA | |
| | | AGGCAAAAUGCCGUGUUUAUCUCGUCAACUUGUUG | |
| | | GCGAGAUsmUsmUsmU | |
| gRNA1078 | TSBTx3502 | mGsmUsmUsCUGUCUUUUGGUCAGGACAACCGUCU | 758 |
| | | AGCUAUAAGUGCUGCAGGGUGUGAGAAACUCCUAU | |
| | | UGCUGGACGAUGUCUCUUACGAGGCAUUAGCACUG | |
| | | UCACAGGAUGUCUGAsmCsmUsmC | |
| gRNA1079 | TSBTx3503 | mCsmAsmAsAUGCCCAAUACUGCCAGAGUUUUAGU | 759 |
| | | ACUCUGUAAUGAAAAUUACAGAAUCUACUAAAACA | |
| | | AGGCAAAAUGCCGUGUUUAUCUCGUCAACUUGUUG | |
| | | GCGAGAUsmUsmUsmU | |
| gRNA1080 | TSBTx3504 | mCsmUsmUsUUACCUUUUCUCCAUGUCGUUUUAGU | 760 |
| | | ACUCUGUAAUGAAAAUUACAGAAUCUACUAAAACA | |
| | | AGGCAAAAUGCCGUGUUUAUCUCGUCAACUUGUUG | |
| | | GCGAGAUsmUsmUsmU | |
| gRNA1081 | TSBTx3505 | mGsmUsmUsCUGUCUUUUGGUCAGGACAACCGUCU | 761 |
| | | AGCUAUAAGUGCUGCAGGGUGUGAGAAACUCCUAU | |
| | | UGCUGGACGAUGUCUCUUACGAGGCAUUAGCACUA | |
| | | AAAUAGGUUUGGUUGsmCsmUsmU | |
| gRNA1082 | TSBTx3506 | mUsmUsmCsCUUGAAGCAAUGUGGUCAGUUUUAGU | 762 |
| | | ACUCUGUAAUGAAAAUUACAGAAUCUACUAAAACA | |
| | | AGGCAAAAUGCCGUGUUUAUCUCGUCAACUUGUUG | |
| | | GCGAGAUsmUsmUsmU | |
| gRNA1083 | TSBTx3507 | mUsmUsmGsAAGCAAUGUGGUCAUCAAGUUUUAGU | 763 |
| | | ACUCUGUAAUGAAAAUUACAGAAUCUACUAAAACA | |
| | | AGGCAAAAUGCCGUGUUUAUCUCGUCAACUUGUUG | |
| | | GCGAGAUsmUsmUsmU | |
| gRNA1084 | TSBTx3508 | mAsmAsmGsCAAUGUGGUCAUCAAAUAGUUUUAGU | 764 |
| | | ACUCUGUAAUGAAAAUUACAGAAUCUACUAAAACA | |
| | | AGGCAAAAUGCCGUGUUUAUCUCGUCAACUUGUUG | |
| | | GCGAGAUsmUsmUsmU | |
| gRNA1085 | TSBTx3509 | mAsmAsmUsGUGGUCAUCAAAUAAGUGGUUUUAGU | 765 |
| | | ACUCUGUAAUGAAAAUUACAGAAUCUACUAAAACA | |
| | | AGGCAAAAUGCCGUGUUUAUCUCGUCAACUUGUUG | |
| | | GCGAGAUsmUsmUsmU | |
| gRNA1086 | TSBTx3510 | mUsmCsmAsUCAAAUAAGUGGUAAGUUGUUUUAGU | 766 |
| | | ACUCUGUAAUGAAAAUUACAGAAUCUACUAAAACA | |
| | | AGGCAAAAUGCCGUGUUUAUCUCGUCAACUUGUUG | |
| | | GCGAGAUsmUsmUsmU | |
| gRNA1087 | TSBTx3511 | mAsmAsmAsUUCACAACUUACCACUUAGUUUUAGU | 767 |
| | | ACUCUGUAAUGAAAAUUACAGAAUCUACUAAAACA | |
| | | AGGCAAAAUGCCGUGUUUAUCUCGUCAACUUGUUG | |
| | | GCGAGAUsmUsmUsmU | |
| gRNA1088 | TSBTx3512 | mUsmUsmCsACAACUUACCACUUAUUGUUUUAGAG | 768 |
| | | CUAGAAAUAGCAAGUUAAAAUAAGGCUAGUCCGUU | |
| | | AUCAACUUGAAAAAGUGGCACCGAGUCGGUGCUsm | |
| | | UsmUsmU | |
| gRNA1089 | TSBTx3513 | mGsmUsmUsCUGUCUUUUGGUCAGGACAACCGUCU | 769 |
| | | AGCUAUAAGUGCUGCAGGGUGUGAGAAACUCCUAU | |
| | | UGCUGGACGAUGUCUCUUACGAGGCAUUAGCACAC | |
| | | AACUUACCACUUAUUsmUsmGsmA | |
| gRNA1090 | TSBTx3514 | mUsmUsmUsCUUGUACAGCUUGCCAUGUUUUAGAG | 770 |
| | | CUAGAAAUAGCAAGUUAAAAUAAGGCUAGUCCGUU | |
| | | AUCAACUUGAAAAAGUGGCACCGAGUCGGUGCUsm | |
| | | UsmUsmU | |
| gRNA1091 | TSBTx3515 | mUsmUsmGsCCAUCGAGACAUUUAUAAGUUUUAGU | 77 |
| | | ACUCUGUAAUGAAAAUUACAGAAUCUACUAAAACA | |
| | | AGGCAAAAUGCCGUGUUUAUCUCGUCAACUUGUUG | |
| | | GCGAGAUsmUsmUsmU | |
| gRNA1092 | TSBTx3516 | mCsmAsmUsCGAGACAUUUAUAAAGGAGUUUUAGU | 772 |
| | | ACUCUGUAAUGAAAAUUACAGAAUCUACUAAAACA | |
| | | AGGCAAAAUGCCGUGUUUAUCUCGUCAACUUGUUG | |
| | | GCGAGAUsmUsmUsmU | |
| gRNA1093 | TSBTx3517 | mUsmCsmCsUCUCAUAUCAACUCCUUUGUUUUAGU | 773 |
| | | ACUCUGUAAUGAAAAUUACAGAAUCUACUAAAACA | |
| | | AGGCAAAAUGCCGUGUUUAUCUCGUCAACUUGUUG | |
| | | GCGAGAUsmUsmUsmU | |
| gRNA1094 | TSBTx3518 | mGsmAsmAsGAAUGCCAAAAAAGGUGCGUUUUAGU | 774 |
| | | ACUCUGUAAUGAAAAUUACAGAAUCUACUAAAACA | |
| | | AGGCAAAAUGCCGUGUUUAUCUCGUCAACUUGUUG | |
| | | GCGAGAUsmUsmUsmU | |
| gRNA1095 | TSBTx3519 | mCsmCsmAsCGCAAACAUUUCACAAGGGUUUUAGU | 775 |
| | | ACUCUGUAAUGAAAAUUACAGAAUCUACUAAAACA | |
| | | AGGCAAAAUGCCGUGUUUAUCUCGUCAACUUGUUG | |
| | | GCGAGAUsmUsmUsmU | |
| gRNA1096 | TSBTx3520 | mAsmAsmAsCAUUUCACAAGGCAGAGUGUUUUAGU | 776 |
| | | ACUCUGUAAUGAAAAUUACAGAAUCUACUAAAACA | |
| | | AGGCAAAAUGCCGUGUUUAUCUCGUCAACUUGUUG | |
| | | GCGAGAUsmUsmUsmU | |
| gRNA1097 | TSBTx3521 | mCsmAsmUsUUCACAAGGCAGAGUACGUUUUAGAG | 777 |
| | | CUAGAAAUAGCAAGUUAAAAUAAGGCUAGUCCGUU | |
| | | AUCAACUUGAAAAAGUGGCACCGAGUCGGUGCUsm | |
| | | UsmUsmU | |
| gRNA1098 | TSBTx3522 | mAsmUsmUsUCACAAGGCAGAGUACCGGUUUUAGU | 778 |
| | | ACUCUGUAAUGAAAAUUACAGAAUCUACUAAAACA | |
| | | AGGCAAAAUGCCGUGUUUAUCUCGUCAACUUGUUG | |
| | | GCGAGAUsmUsmUsmU | |
| gRNA1099 | TSBTx3523 | mAsmCsmUsCACCGGUACUCUGCCUUGGUUUUAGU | 779 |
| | | ACUCUGUAAUGAAAAUUACAGAAUCUACUAAAACA | |
| | | AGGCAAAAUGCCGUGUUUAUCUCGUCAACUUGUUG | |
| | | GCGAGAUsmUsmUsmU | |
| gRNA1100 | TSBTx3524 | mGsmUsmUsCUGUCUUUUGGUCAGGACAACCGUCU | 780 |
| | | AGCUAUAAGUGCUGCAGGGUGUGAGAAACUCCUAU | |
| | | UGCUGGACGAUGUCUCUUACGAGGCAUUAGCACCA | |
| | | CAAGGCAGAGUACCGsmGsmUsmG | |
| gRNA1101 | TSBTx3525 | mUsmUsmCsACAAGGCAGAGUACCGGGUUUUAGAG | 781 |
| | | CUAGAAAUAGCAAGUUAAAAUAAGGCUAGUCCGUU | |
| | | AUCAACUUGAAAAAGUGGCACCGAGUCGGUGCUsm | |
| | | UsmUsmU | |
| gRNA1102 | TSBTx3526 | mCsmUsmCsACCGGUACUCUGCCUUGGUUUUAGAG | 782 |
| | | CUAGAAAUAGCAAGUUAAAAUAAGGCUAGUCCGUU | |
| | | AUCAACUUGAAAAAGUGGCACCGAGUCGGUGCUsm | |
| | | UsmUsmU | |
| gRNA1103 | TSBTx3527 | mAsmCsmAsAGGCAGAGUACCGGUGAGGUUUUAGU | 783 |
| | | ACUCUGUAAUGAAAAUUACAGAAUCUACUAAAACA | |
| | | AGGCAAAAUGCCGUGUUUAUCUCGUCAACUUGUUG | |
| | | GCGAGAUsmUsmUsmU | |
| gRNA1104 | TSBTx3528 | mAsmAsmUsUGUACUCACCGGUACUCGUUUUAGAG | 784 |
| | | CUAGAAAUAGCAAGUUAAAAUAAGGCUAGUCCGUU | |
| | | AUCAACUUGAAAAAGUGGCACCGAGUCGGUGCUsm | |
| | | UsmUsmU | |
| gRNA1105 | TSBTx3529 | mUsmUsmGsUUCCUGAAUGGGAAGAAAGUUUUAGU | 785 |
| | | ACUCUGUAAUGAAAAUUACAGAAUCUACUAAAACA | |
| | | AGGCAAAAUGCCGUGUUUAUCUCGUCAACUUGUUG | |
| | | GCGAGAUsmUsmUsmU | |
| gRNA1106 | TSBTx3530 | mGsmUsmUsCUGUCUUUUGGUCAGGACAACCGUCU | 786 |
| | | AGCUAUAAGUGCUGCAGGGUGUGAGAAACUCCUAU | |
| | | UGCUGGACGAUGUCUCUUACGAGGCAUUAGCACCC | |
| | | AUUCAGGAACAAUUGsmCsmCsmU | |
| gRNA1107 | TSBTx3531 | mCsmAsmUsUCAGGAACAAUUGCCUAUGUUUUAGU | 787 |
| | | ACUCUGUAAUGAAAAUUACAGAAUCUACUAAAACA | |
| | | AGGCAAAAUGCCGUGUUUAUCUCGUCAACUUGUUG | |
| | | GCGAGAUsmUsmUsmU | |
| gRNA1108 | TSBTx3532 | mCsmAsmAsUUACCAAUUUCUGAAAGGUUUUAGAG | 788 |
| | | CUAGAAAUAGCAAGUUAAAAUAAGGCUAGUCCGUU | |
| | | AUCAACUUGAAAAAGUGGCACCGAGUCGGUGCUsm | |
| | | UsmUsmU | |
| gRNA1109 | TSBTx3533 | mGsmUsmCsCUACAAUUACCAAUUUCGUUUUAGAG | 789 |
| | | CUAGAAAUAGCAAGUUAAAAUAAGGCUAGUCCGUU | |
| | | AUCAACUUGAAAAAGUGGCACCGAGUCGGUGCUsm | |
| | | UsmUsmU | |
| gRNA1110 | TSBTx3534 | mCsmAsmAsCCUGUGAACUCACAGAGAGUUUUAGU | 790 |
| | | ACUCUGUAAUGAAAAUUACAGAAUCUACUAAAACA | |
| | | AGGCAAAAUGCCGUGUUUAUCUCGUCAACUUGUUG | |
| | | GCGAGAUsmUsmUsmU | |
| gRNA1111 | TSBTx3535 | mAsmUsmCsUUCCAGCAUCUUGCGUUCGUUUUAGU | 791 |
| | | ACUCUGUAAUGAAAAUUACAGAAUCUACUAAAACA | |
| | | AGGCAAAAUGCCGUGUUUAUCUCGUCAACUUGUUG | |
| | | GCGAGAUsmUsmUsmU | |
| gRNA1112 | TSBTx3536 | mUsmCsmGsAUUUUCCAUACAUUUGUAGUUUUAGU | 792 |
| | | ACUCUGUAAUGAAAAUUACAGAAUCUACUAAAACA | |
| | | AGGCAAAAUGCCGUGUUUAUCUCGUCAACUUGUUG | |
| | | GCGAGAUsmUsmUsmU | |
| gRNA1113 | TSBTx3537 | mCsmUsmCsCUCAAGAAAACACCAUAUGUUUUAGU | 793 |
| | | ACUCUGUAAUGAAAAUUACAGAAUCUACUAAAACA | |
| | | AGGCAAAAUGCCGUGUUUAUCUCGUCAACUUGUUG | |
| | | GCGAGAUsmUsmUsmU | |
| gRNA1114 | TSBTx3538 | mAsmUsmUsACCAGGUAAAGUUCUUUUGUUUUAGU | 794 |
| | | ACUCUGUAAUGAAAAUUACAGAAUCUACUAAAACA | |
| | | AGGCAAAAUGCCGUGUUUAUCUCGUCAACUUGUUG | |
| | | GCGAGAUsmUsmUsmU | |
| gRNA1115 | TSBTx3539 | mAsmUsmUsACCAGGUAAAGUUCUUUGUUUUAGAG | 795 |
| | | CUAGAAAUAGCAAGUUAAAAUAAGGCUAGUCCGUU | |
| | | AUCAACUUGAAAAAGUGGCACCGAGUCGGUGCUsm | |
| | | UsmUsmU | |
| gRNA1116 | TSBTx3540 | mGsmUsmUsCUGUCUUUUGGUCAGGACAACCGUCU | 796 |
| | | AGCUAUAAGUGCUGCAGGGUGUGAGAAACUCCUAU | |
| | | UGCUGGACGAUGUCUCUUACGAGGCAUUAGCACAC | |
| | | ACAGAACCCUGCCAUsmUsmCsmU | |
| gRNA1117 | TSBTx3541 | mUsmGsmAsCACAGAACCCUGCCAUUCGUUUUAGU | 797 |
| | | ACUCUGUAAUGAAAAUUACAGAAUCUACUAAAACA | |
| | | AGGCAAAAUGCCGUGUUUAUCUCGUCAACUUGUUG | |
| | | GCGAGAUsmUsmUsmU | |
| gRNA1118 | TSBTx3542 | mUsmCsmCsUCCAAAGUCAACUCCCGGGUUUUAGU | 798 |
| | | ACUCUGUAAUGAAAAUUACAGAAUCUACUAAAACA | |
| | | AGGCAAAAUGCCGUGUUUAUCUCGUCAACUUGUUG | |
| | | GCGAGAUsmUsmUsmU | |
| gRNA1119 | TSBTx3543 | mCsmUsmUsCUCCUCCAAAGUCAACUCGUUUUAGU | 799 |
| | | ACUCUGUAAUGAAAAUUACAGAAUCUACUAAAACA | |
| | | AGGCAAAAUGCCGUGUUUAUCUCGUCAACUUGUUG | |
| | | GCGAGAUsmUsmUsmU | |
| gRNA1120 | TSBTx3544 | mAsmCsmUsCCUUUAACAAAAGUCACAGUUUUAGU | 800 |
| | | ACUCUGUAAUGAAAAUUACAGAAUCUACUAAAACA | |
| | | AGGCAAAAUGCCGUGUUUAUCUCGUCAACUUGUUG | |
| | | GCGAGAUsmUsmUsmU | |
| gRNA1121 | TSBTx3545 | mUsmGsmUsUUGCCAAGAGACUUGCACGUUUUAGU | 801 |
| | | ACUCUGUAAUGAAAAUUACAGAAUCUACUAAAACA | |
| | | AGGCAAAAUGCCGUGUUUAUCUCGUCAACUUGUUG | |
| | | GCGAGAUsmUsmUsmU | |
| gRNA1122 | TSBTx3546 | mUsmUsmGsCCAAGAGACUUGCACAAAGUUUUAGU | 802 |
| | | ACUCUGUAAUGAAAAUUACAGAAUCUACUAAAACA | |
| | | AGGCAAAAUGCCGUGUUUAUCUCGUCAACUUGUUG | |
| | | GCGAGAUsmUsmUsmU | |
| gRNA1123 | TSBTx3547 | mCsmCsmUsUACAGUCUUCUGGGAGUAGUUUUAGU | 803 |
| | | ACUCUGUAAUGAAAAUUACAGAAUCUACUAAAACA | |
| | | AGGCAAAAUGCCGUGUUUAUCUCGUCAACUUGUUG | |
| | | GCGAGAUsmUsmUsmU | |
| gRNA1124 | TSBTx3548 | mUsmUsmAsCAGUCUUCUGGGAGUAAGUUUUAGAG | 804 |
| | | CUAGAAAUAGCAAGUUAAAAUAAGGCUAGUCCGUU | |
| | | AUCAACUUGAAAAAGUGGCACCGAGUCGGUGCUsm | |
| | | UsmUsmU | |
| gRNA1125 | TSBTx3549 | mGsmUsmUsCUGUCUUUUGGUCAGGACAACCGUCU | 805 |
| | | AGCUAUAAGUGCUGCAGGGUGUGAGAAACUCCUAU | |
| | | UGCUGGACGAUGUCUCUUACGAGGCAUUAGCACCU | |
| | | UACAGUCUUCUGGGAsmGsmUsmA | |
| gRNA1126 | TSBTx3550 | mUsmUsmCsUCUUCCUUACAGUCUUCUGUUUUAGU | 806 |
| | | ACUCUGUAAUGAAAAUUACAGAAUCUACUAAAACA | |
| | | AGGCAAAAUGCCGUGUUUAUCUCGUCAACUUGUUG | |
| | | GCGAGAUsmUsmUsmU | |
| gRNA1127 | TSBTx3551 | mCsmUsmCsUUCCUUACAGUCUUCUGGUUUUAGAG | 807 |
| | | CUAGAAAUAGCAAGUUAAAAUAAGGCUAGUCCGUU | |
| | | AUCAACUUGAAAAAGUGGCACCGAGUCGGUGCUsm | |
| | | UsmUsmU | |
| gRNA1128 | TSBTx3552 | mUsmCsmCsCAGAAGACUGUAAGGAAGGUUUUAGU | 808 |
| | | ACUCUGUAAUGAAAAUUACAGAAUCUACUAAAACA | |
| | | AGGCAAAAUGCCGUGUUUAUCUCGUCAACUUGUUG | |
| | | GCGAGAUsmUsmUsmU | |
| gRNA1129 | TSBTx3553 | mAsmCsmUsGUAAGGAAGAGAAGUAAGUUUUAGAG | 809 |
| | | CUAGAAAUAGCAAGUUAAAAUAAGGCUAGUCCGUU | |
| | | AUCAACUUGAAAAAGUGGCACCGAGUCGGUGCUsm | |
| | | UsmUsmU | |
| gRNA1130 | TSBTx3554 | mAsmUsmUsUCCUUUACUUCUCUUCCUGUUUUAGU | 810 |
| | | ACUCUGUAAUGAAAAUUACAGAAUCUACUAAAACA | |
| | | AGGCAAAAUGCCGUGUUUAUCUCGUCAACUUGUUG | |
| | | GCGAGAUsmUsmUsmU | |
| gRNA1131 | TSBTx3555 | mAsmCsmUsGUAAGGAAGAGAAGUAAAGUUUUAGU | 811 |
| | | ACUCUGUAAUGAAAAUUACAGAAUCUACUAAAACA | |
| | | AGGCAAAAUGCCGUGUUUAUCUCGUCAACUUGUUG | |
| | | GCGAGAUsmUsmUsmU | |
| gRNA1132 | TSBTx3556 | mCsmUsmGsUAAGGAAGAGAAGUAAAGUUUUAGAG | 812 |
| | | CUAGAAAUAGCAAGUUAAAAUAAGGCUAGUCCGUU | |
| | | AUCAACUUGAAAAAGUGGCACCGAGUCGGUGCUsm | |
| | | UsmUsmU | |
| gRNA1133 | TSBTx3557 | mGsmUsmUsCUGUCUUUUGGUCAGGACAACCGUCU | 813 |
| | | AGCUAUAAGUGCUGCAGGGUGUGAGAAACUCCUAU | |
| | | UGCUGGACGAUGUCUCUUACGAGGCAUUAGCACCC | |
| | | UUUACUUCUCUUCCUsmUsmAsmC | |
| gRNA1134 | TSBTx3558 | mCsmAsmCsUUACACCUAGAUGAAAUGGUUUUAGU | 814 |
| | | ACUCUGUAAUGAAAAUUACAGAAUCUACUAAAACA | |
| | | AGGCAAAAUGCCGUGUUUAUCUCGUCAACUUGUUG | |
| | | GCGAGAUsmUsmUsmU | |
| gRNA1135 | TSBTx3559 | mAsmCsmAsCUUACACCUAGAUGAAAGUUUUAGAG | 815 |
| | | CUAGAAAUAGCAAGUUAAAAUAAGGCUAGUCCGUU | |
| | | AUCAACUUGAAAAAGUGGCACCGAGUCGGUGCUsm | |
| | | UsmUsmU | |
| gRNA1136 | TSBTx3560 | mGsmUsmUsCUGUCUUUUGGUCAGGACAACCGUCU | 816 |
| | | AGCUAUAAGUGCUGCAGGGUGUGAGAAACUCCUAU | |
| | | UGCUGGACGAUGUCUCUUACGAGGCAUUAGCACCA | |
| | | UCUAGGUGUAAGUGUsmUsmUsmC | |
| gRNA1137 | TSBTx3561 | mCsmAsmUsCUAGGUGUAAGUGUUUCUGUUUUAGU | 817 |
| | | ACUCUGUAAUGAAAAUUACAGAAUCUACUAAAACA | |
| | | AGGCAAAAUGCCGUGUUUAUCUCGUCAACUUGUUG | |
| | | GCGAGAUsmUsmUsmU | |
| gRNA1138 | TSBTx3562 | mCsmUsmAsGGUGUAAGUGUUUCUUAGUUUUAGAG | 818 |
| | | CUAGAAAUAGCAAGUUAAAAUAAGGCUAGUCCGUU | |
| | | AUCAACUUGAAAAAGUGGCACCGAGUCGGUGCUsm | |
| | | UsmUsmU | |
| gRNA1139 | TSBTx3563 | mAsmGsmGsUUACUCACCAGAGUUGUCGUUUUAGU | 819 |
| | | ACUCUGUAAUGAAAAUUACAGAAUCUACUAAAACA | |
| | | AGGCAAAAUGCCGUGUUUAUCUCGUCAACUUGUUG | |
| | | GCGAGAUsmUsmUsmU | |
| gRNA1140 | TSBTx3564 | mGsmAsmCsUGAAAAGAGAGCGUUGACGUUUUAGU | 820 |
| | | ACUCUGUAAUGAAAAUUACAGAAUCUACUAAAACA | |
| | | AGGCAAAAUGCCGUGUUUAUCUCGUCAACUUGUUG | |
| | | GCGAGAUsmUsmUsmU | |
| gRNA1141 | TSBTx3565 | mCsmAsmAsGCACACGCAUUGUUGGAGUUUUAGAG | 821 |
| | | CUAGAAAUAGCAAGUUAAAAUAAGGCUAGUCCGUU | |
| | | AUCAACUUGAAAAAGUGGCACCGAGUCGGUGCUsm | |
| | | UsmUsmU | |
| gRNA1142 | TSBTx3566 | mGsmUsmUsCUGUCUUUUGGUCAGGACAACCGUCU | 822 |
| | | AGCUAUAAGUGCUGCAGGGUGUGAGAAACUCCUAU | |
| | | UGCUGGACGAUGUCUCUUACGAGGCAUUAGCACCU | |
| | | CCAACAAUGCGUGUGsmCsmUsmU | |
| gRNA1143 | TSBTx3567 | mGsmCsmCsAGGGCCACUCUCCCCAAGGUUUUAGU | 823 |
| | | ACUCUGUAAUGAAAAUUACAGAAUCUACUAAAACA | |
| | | AGGCAAAAUGCCGUGUUUAUCUCGUCAACUUGUUG | |
| | | GCGAGAUsmUsmUsmU | |
| gRNA1144 | TSBTx3568 | mCsmAsmGsCUCAGAGGCACCUGUGUGGUUUUAGU | 824 |
| | | ACUCUGUAAUGAAAAUUACAGAAUCUACUAAAACA | |
| | | AGGCAAAAUGCCGUGUUUAUCUCGUCAACUUGUUG | |
| | | GCGAGAUsmUsmUsmU | |
| gRNA1145 | TSBTx3569 | mGsmUsmGsAGGACCCACUGGUGUCCUGUUUUAGU | 825 |
| | | ACUCUGUAAUGAAAAUUACAGAAUCUACUAAAACA | |
| | | AGGCAAAAUGCCGUGUUUAUCUCGUCAACUUGUUG | |
| | | GCGAGAUsmUsmUsmU | |
| gRNA1146 | TSBTx3570 | mUsmCsmAsCUGCUGCCCACUGCUUUGGUUUUAGU | 826 |
| | | ACUCUGUAAUGAAAAUUACAGAAUCUACUAAAACA | |
| | | AGGCAAAAUGCCGUGUUUAUCUCGUCAACUUGUUG | |
| | | GCGAGAUsmUsmUsmU | |
| gRNA1147 | TSBTx3571 | mUsmUsmAsCCCAUCAAAGCAGUGGGCGUUUUAGU | 827 |
| | | ACUCUGUAAUGAAAAUUACAGAAUCUACUAAAACA | |
| | | AGGCAAAAUGCCGUGUUUAUCUCGUCAACUUGUUG | |
| | | GCGAGAUsmUsmUsmU | |
| gRNA1148 | TSBTx3572 | mCsmUsmGsCUGCCCACUGCUUUGAUGUUUUAGAG | 828 |
| | | CUAGAAAUAGCAAGUUAAAAUAAGGCUAGUCCGUU | |
| | | AUCAACUUGAAAAAGUGGCACCGAGUCGGUGCUsm | |
| | | UsmUsmU | |
| gRNA1149 | TSBTx3573 | mUsmGsmCsUGCCCACUGCUUUGAUGGGUUUUAGU | 829 |
| | | ACUCUGUAAUGAAAAUUACAGAAUCUACUAAAACA | |
| | | AGGCAAAAUGCCGUGUUUAUCUCGUCAACUUGUUG | |
| | | GCGAGAUsmUsmUsmU | |
| gRNA1150 | TSBTx3574 | mAsmCsmUsUACCCAUCAAAGCAGUGGUUUUAGAG | 830 |
| | | CUAGAAAUAGCAAGUUAAAAUAAGGCUAGUCCGUU | |
| | | AUCAACUUGAAAAAGUGGCACCGAGUCGGUGCUsm | |
| | | UsmUsmU | |
| gRNA1151 | TSBTx3575 | mCsmAsmCsUUACCCAUCAAAGCAGUGUUUUAGAG | 831 |
| | | CUAGAAAUAGCAAGUUAAAAUAAGGCUAGUCCGUU | |
| | | AUCAACUUGAAAAAGUGGCACCGAGUCGGUGCUsm | |
| | | UsmUsmU | |
| gRNA1152 | TSBTx3576 | mGsmGsmGsGAAGCCUAGGAGAGAAAAGUUUUAGU | 832 |
| | | ACUCUGUAAUGAAAAUUACAGAAUCUACUAAAACA | |
| | | AGGCAAAAUGCCGUGUUUAUCUCGUCAACUUGUUG | |
| | | GCGAGAUsmUsmUsmU | |
| gRNA1153 | TSBTx3577 | mUsmUsmCsUCUCCUAGGCUUCCCCUGGUUUUAGU | 833 |
| | | ACUCUGUAAUGAAAAUUACAGAAUCUACUAAAACA | |
| | | AGGCAAAAUGCCGUGUUUAUCUCGUCAACUUGUUG | |
| | | GCGAGAUsmUsmUsmU | |
| gRNA1154 | TSBTx3578 | mCsmUsmGsCAGGAUGUUUGGCGCAUCGUUUUAGU | 834 |
| | | ACUCUGUAAUGAAAAUUACAGAAUCUACUAAAACA | |
| | | AGGCAAAAUGCCGUGUUUAUCUCGUCAACUUGUUG | |
| | | GCGAGAUsmUsmUsmU | |
| gRNA1155 | TSBTx3579 | mAsmGsmGsGAAUCAUGAUAUCGCCUGUUUUAGAG | 835 |
| | | CUAGAAAUAGCAAGUUAAAAUAAGGCUAGUCCGUU | |
| | | AUCAACUUGAAAAAGUGGCACCGAGUCGGUGCUsm | |
| | | UsmUsmU | |
| gRNA1156 | TSBTx3580 | mCsmUsmCsCAGGCUCCUUUGAAUUACGUUUUAGU | 836 |
| | | ACUCUGUAAUGAAAAUUACAGAAUCUACUAAAACA | |
| | | AGGCAAAAUGCCGUGUUUAUCUCGUCAACUUGUUG | |
| | | GCGAGAUsmUsmUsmU | |
| gRNA1157 | TSBTx3581 | mAsmUsmAsCCAGUGUAAUUCAAAGGGUUUUAGAG | 837 |
| | | CUAGAAAUAGCAAGUUAAAAUAAGGCUAGUCCGUU | |
| | | AUCAACUUGAAAAAGUGGCACCGAGUCGGUGCUsm | |
| | | UsmUsmU | |
| gRNA1158 | TSBTx3582 | mAsmCsmAsUACCAGUGUAAUUCAAAGUUUUAGAG | 838 |
| | | CUAGAAAUAGCAAGUUAAAAUAAGGCUAGUCCGUU | |
| | | AUCAACUUGAAAAAGUGGCACCGAGUCGGUGCUsm | |
| | | UsmUsmU | |
| gRNA1159 | TSBTx3583 | mUsmAsmCsAUACCAGUGUAAUUCAAGUUUUAGAG | 839 |
| | | CUAGAAAUAGCAAGUUAAAAUAAGGCUAGUCCGUU | |
| | | AUCAACUUGAAAAAGUGGCACCGAGUCGGUGCUsm | |
| | | UsmUsmU | |
| gRNA1160 | TSBTx3584 | mUsmGsmGsAAUUCUGAAACAUAAUUUGUUUUAGU | 840 |
| | | ACUCUGUAAUGAAAAUUACAGAAUCUACUAAAACA | |
| | | AGGCAAAAUGCCGUGUUUAUCUCGUCAACUUGUUG | |
| | | GCGAGAUsmUsmUsmU | |
| gRNA1161 | TSBTx3585 | mGsmUsmUsCUGUCUUUUGGUCAGGACAACCGUCU | 841 |
| | | AGCUAUAAGUGCUGCAGGGUGUGAGAAACUCCUAU | |
| | | UGCUGGACGAUGUCUCUUACGAGGCAUUAGCACUG | |
| | | UUUCAGAAUUCCAAAsmAsmAsmC | |
| gRNA1162 | TSBTx3586 | mUsmUsmAsUGUUUCAGAAUUCCAAAAGUUUUAGU | 842 |
| | | ACUCUGUAAUGAAAAUUACAGAAUCUACUAAAACA | |
| | | AGGCAAAAUGCCGUGUUUAUCUCGUCAACUUGUUG | |
| | | GCGAGAUsmUsmUsmU | |
| gRNA1163 | TSBTx3587 | mUsmCsmCsGGUUACCCAACAGUUGGUGUUUUAGU | 843 |
| | | ACUCUGUAAUGAAAAUUACAGAAUCUACUAAAACA | |
| | | AGGCAAAAUGCCGUGUUUAUCUCGUCAACUUGUUG | |
| | | GCGAGAUsmUsmUsmU | |
| gRNA1164 | TSBTx3588 | mGsmCsmCsCCAUCCGGUUACCCAACAGUUUUAGU | 844 |
| | | ACUCUGUAAUGAAAAUUACAGAAUCUACUAAAACA | |
| | | AGGCAAAAUGCCGUGUUUAUCUCGUCAACUUGUUG | |
| | | GCGAGAUsmUsmUsmU | |
| gRNA1165 | TSBTx3589 | mAsmGsmAsAGCCCCAUCCGGUUACCCGUUUUAGU | 845 |
| | | ACUCUGUAAUGAAAAUUACAGAAUCUACUAAAACA | |
| | | AGGCAAAAUGCCGUGUUUAUCUCGUCAACUUGUUG | |
| | | GCGAGAUsmUsmUsmU | |
| gRNA1166 | TSBTx3590 | mUsmCsmAsUGCUUACCUUUCUCCUUGUUUUAGAG | 846 |
| | | CUAGAAAUAGCAAGUUAAAAUAAGGCUAGUCCGUU | |
| | | AUCAACUUGAAAAAGUGGCACCGAGUCGGUGCUsm | |
| | | UsmUsmU | |
| gRNA1167 | TSBTx3591 | mUsmGsmGsUUACUCACAGGUGAAAUCGUUUUAGU | 847 |
| | | ACUCUGUAAUGAAAAUUACAGAAUCUACUAAAACA | |
| | | AGGCAAAAUGCCGUGUUUAUCUCGUCAACUUGUUG | |
| | | GCGAGAUsmUsmUsmU | |
| gRNA1168 | TSBTx3592 | mGsmUsmUsCUGUCUUUUGGUCAGGACAACCGUCU | 848 |
| | | AGCUAUAAGUGCUGCAGGGUGUGAGAAACUCCUAU | |
| | | UGCUGGACGAUGUCUCUUACGAGGCAUUAGCACCU | |
| | | CACAGGUGAAAUCCAsmAsmAsmA | |
| gRNA1169 | TSBTx3593 | mUsmCsmUsACAAAAGGUAAAUAUUCCGUUUUAGU | 849 |
| | | ACUCUGUAAUGAAAAUUACAGAAUCUACUAAAACA | |
| | | AGGCAAAAUGCCGUGUUUAUCUCGUCAACUUGUUG | |
| | | GCGAGAUsmUsmUsmU | |
| gRNA1170 | TSBTx3594 | mGsmAsmAsGAAUGCCAGAAAAGAUAUGUUUUAGU | 850 |
| | | ACUCUGUAAUGAAAAUUACAGAAUCUACUAAAACA | |
| | | AGGCAAAAUGCCGUGUUUAUCUCGUCAACUUGUUG | |
| | | GCGAGAUsmUsmUsmU | |
| gRNA1171 | TSBTx3595 | mCsmCsmCsUGAGUCACAGUGGAAAAAGUUUUAGU | 851 |
| | | ACUCUGUAAUGAAAAUUACAGAAUCUACUAAAACA | |
| | | AGGCAAAAUGCCGUGUUUAUCUCGUCAACUUGUUG | |
| | | GCGAGAUsmUsmUsmU | |
| gRNA1172 | TSBTx3596 | mAsmAsmUsCUCCCUGAGUCACAGUGGGUUUUAGU | 852 |
| | | ACUCUGUAAUGAAAAUUACAGAAUCUACUAAAACA | |
| | | AGGCAAAAUGCCGUGUUUAUCUCGUCAACUUGUUG | |
| | | GCGAGAUsmUsmUsmU | |
| gRNA1173 | TSBTx3597 | mUsmCsmCsACUGUGACUCAGGGAGAUGUUUUAGU | 853 |
| | | ACUCUGUAAUGAAAAUUACAGAAUCUACUAAAACA | |
| | | AGGCAAAAUGCCGUGUUUAUCUCGUCAACUUGUUG | |
| | | GCGAGAUsmUsmUsmU | |
| gRNA1174 | TSBTx3598 | mUsmGsmAsAUCUCCCUGAGUCACAGGUUUUAGAG | 854 |
| | | CUAGAAAUAGCAAGUUAAAAUAAGGCUAGUCCGUU | |
| | | AUCAACUUGAAAAAGUGGCACCGAGUCGGUGCUsm | |
| | | UsmUsmU | |
| gRNA1175 | TSBTx3599 | mAsmCsmUsGUGACUCAGGGAGAUUCGUUUUAGAG | 855 |
| | | CUAGAAAUAGCAAGUUAAAAUAAGGCUAGUCCGUU | |
| | | AUCAACUUGAAAAAGUGGCACCGAGUCGGUGCUsm | |
| | | UsmUsmU | |
| gRNA1176 | TSBTx3600 | mAsmCsmCsACCUGAAUCUCCCUGAGUGUUUUAGU | 856 |
| | | ACUCUGUAAUGAAAAUUACAGAAUCUACUAAAACA | |
| | | AGGCAAAAUGCCGUGUUUAUCUCGUCAACUUGUUG | |
| | | GCGAGAUsmUsmUsmU | |
| gRNA1177 | TSBTx3601 | mAsmCsmUsGUGACUCAGGGAGAUUCAGUUUUAGU | 857 |
| | | ACUCUGUAAUGAAAAUUACAGAAUCUACUAAAACA | |
| | | AGGCAAAAUGCCGUGUUUAUCUCGUCAACUUGUUG | |
| | | GCGAGAUsmUsmUsmU | |
| gRNA1178 | TSBTx3602 | mGsmUsmGsACUCAGGGAGAUUCAGGGUUUUAGAG | 858 |
| | | CUAGAAAUAGCAAGUUAAAAUAAGGCUAGUCCGUU | |
| | | AUCAACUUGAAAAAGUGGCACCGAGUCGGUGCUsm | |
| | | UsmUsmU | |
| gRNA1179 | TSBTx3603 | mGsmGsmAsGCAACCUGGUGUCUACACGUUUUAGU | 859 |
| | | ACUCUGUAAUGAAAAUUACAGAAUCUACUAAAACA | |
| | | AGGCAAAAUGCCGUGUUUAUCUCGUCAACUUGUUG | |
| | | GCGAGAUsmUsmUsmU | |
| gRNA1180 | TSBTx3604 | mGsmAsmUsGCAGUCACCAGCAUGAGAGUUUUAGU | 860 |
| | | ACUCUGUAAUGAAAAUUACAGAAUCUACUAAAACA | |
| | | AGGCAAAAUGCCGUGUUUAUCUCGUCAACUUGUUG | |
| | | GCGAGAUsmUsmUsmU | |

### Nucleobase Editors

[0152] Useful in the methods and compositions described herein are nucleobase editors that edit, modify or alter a target nucleotide sequence of a polynucleotide. Nucleobase editors described herein typically include a polynucleotide programmable nucleotide binding domain and a nucleobase editing domain (e.g., adenosine deaminase or cytidine deaminase). A polynucleotide programmable nucleotide binding domain, when in conjunction with a bound guide polynucleotide (e.g., gRNA), can specifically bind to a target polynucleotide sequence and thereby localize the base editor to the target nucleic acid sequence desired to be edited.

[0153] In certain embodiments, the nucleobase editors provided herein comprise one or more features that improve base editing activity. For example, any of the nucleobase editors provided herein may comprise a Cas9 domain that has reduced nuclease activity. In some embodiments, any of the nucleobase editors provided herein may have a Cas9 domain that does not have nuclease activity (dCas9), or a Cas9 domain that cuts one strand of a duplexed DNA molecule, referred to as a Cas9 nickase (nCas9). Without wishing to be bound by any particular theory, the presence of the catalytic residue (e.g., H840) maintains the activity of the Cas9 to cleave the non-edited (e.g., non-deaminated) strand opposite the targeted nucleobase. Mutation of the catalytic residue (e.g., D10 to A10) prevents cleavage of the edited (e.g., deaminated) strand containing the targeted residue (e.g., A or C). Such Cas9 variants can generate a single-strand DNA break (nick) at a specific location based on the gRNA-defined target sequence, leading to repair of the non-edited strand, ultimately resulting in a nucleobase change on the non-edited strand.

### Polynucleotide Programmable Nucleotide Binding Domain

[0154] Polynucleotide programmable nucleotide binding domains bind polynucleotides (e.g., RNA, DNA). A polynucleotide programmable nucleotide binding domain of a base editor can itself comprise one or more domains (e.g., one or more nuclease domains). In some embodiments, the nuclease domain of a polynucleotide programmable nucleotide binding domain can comprise an endonuclease or an exonuclease. An endonuclease can cleave a single strand of a double-stranded nucleic acid or both strands of a double-stranded nucleic acid molecule. In some embodiments, a nuclease domain of a polynucleotide programmable nucleotide binding domain can cut zero, one, or two strands of a target polynucleotide.

[0155] Non-limiting examples of a polynucleotide programmable nucleotide binding domain which can be incorporated into a base editor include a CRISPR protein-derived domain, a restriction nuclease, a meganuclease, TAL nuclease (TALEN), and a zinc finger nuclease (ZFN). In some embodiments, a base editor comprises a polynucleotide programmable nucleotide binding domain comprising a natural or modified protein or portion thereof which via a bound guide nucleic acid is capable of binding to a nucleic acid sequence during CRISPR (i.e., Clustered Regularly Interspaced Short Palindromic Repeats)-mediated modification of a nucleic acid. Such a protein is referred to herein as a “CRISPR protein.” Accordingly, disclosed herein is a base editor comprising a polynucleotide programmable nucleotide binding domain comprising all or a portion of a CRISPR protein (i.e. a base editor comprising as a domain all or a portion of a CRISPR protein, also referred to as a “CRISPR protein-derived domain” of the base editor). A CRISPR protein-derived domain incorporated into a base editor can be modified compared to a wild-type or natural version of the CRISPR protein. For example, as described below a CRISPR protein-derived domain can comprise one or more mutations, insertions, deletions, rearrangements and/or recombinations relative to a wild-type or natural version of the CRISPR protein.

[0156] Cas proteins that can be used herein include class 1 and class 2. Non-limiting examples of Cas proteins include Cas1, Cas1B, Cas2, Cas3, Cas4, Cas5, Cas5d, Cas5t, Cas5h, Cas5a, Cas6, Cas7, Cas8, Cas9 (also known as Csn1 or Csx12), Cas10, Csy1, Csy2, Csy3, Csy4, Cse1, Cse2, Cse3, Cse4, Cse5e, Csc1, Csc2, Csa5, Csn1, Csn2, Csm1, Csm2, Csm3, Csm4, Csm5, Csm6, Cmr1, Cmr3, Cmr4, Cmr5, Cmr6, Csb1, Csb2, Csb3, Csx17, Csx14, Csx10, Csx16, CsaX, Csx3, Csx1, Csx1S, Csf1, Csf2, CsO, Csf4, Csd1, Csd2, Cst1, Cst2, Csh1, Csh2, Csa1, Csa2, Csa3, Csa4, Csa5, Cas12a/Cpf1, Cas12b/C2c1 (e.g., SEQ ID NO: 232), Cas12c/C2c3, Cas12d/CasY, Cas12e/CasX, Cas12g, Cas12h, Cas12i, and Cas12j/CasΦ, CARF, DinG, homologues thereof, or modified versions thereof. A CRISPR enzyme can direct cleavage of one or both strands at a target sequence, such as within a target sequence and/or within a complement of a target sequence. For example, a CRISPR enzyme can direct cleavage of one or both strands within about 1, 2, 3, 4, 5, 6, 7, 8, 9, 10, 15, 20, 25, 50, 100, 200, 500, or more base pairs from the first or last nucleotide of a target sequence.

[0157] A vector that encodes a CRISPR enzyme that is mutated to with respect, to a corresponding wild-type enzyme such that the mutated CRISPR enzyme lacks the ability to cleave one or both strands of a target polynucleotide containing a target sequence can be used. A Cas protein (e.g., Cas9, Cas12) or a Cas domain (e.g., Cas9, Cas12) can refer to a polypeptide or domain with at least or at least about 50%, 60%, 70%, 80%, 90%, 91%, 92%, 93%, 94%, 95%, 96%, 97%, 98%, 99%, or 100% sequence identity and/or sequence homology to a wild-type exemplary Cas polypeptide or Cas domain. Cas (e.g., Cas9, Cas12) can refer to the wild-type or a modified form of the Cas protein that can comprise an amino acid change such as a deletion, insertion, substitution, variant, mutation, fusion, chimera, or any combination thereof. In some embodiments, a CRISPR protein-derived domain of a base editor can include all or a portion of Cas9 from Corynebacterium ulcerans (NCBI Refs: NC_015683.1, NC_017317.1); Corynebacterium diphtheria (NCBI Refs: NC_016782.1, NC_016786.1); Spiroplasma syrphidicola (NCBI Ref: NC_021284.1); Prevotella intermedia (NCBI Ref: NC_017861.1); Spiroplasma taiwanense (NCBI Ref: NC_021846.1); Streptococcus iniae (NCBI Ref: NC_021314.1); Belliella baltica (NCBI Ref: NC_018010.1); Psychroflexus torquis (NCBI Ref: NC_018721.1); Streptococcus thermophilus (NCBI Ref: YP_820832.1); Listeria innocua (NCBI Ref: NP_472073.1); Campylobacter jejuni (NCBI Ref: YP_002344900.1); Neisseria meningitidis (NCBI Ref: YP_002342100.1), Streptococcus pyogenes, or Staphylococcus aureus.

[0158] Cas9 nuclease sequences and structures are well known to those of skill in the art (See, e.g., “Complete genome sequence of an M1 strain of Streptococcus pyogenes.” Ferretti et al., Proc. Natl. Acad. Sci. U.S.A. 98:4658-4663(2001); “CRISPR RNA maturation by trans-encoded small RNA and host factor RNase III.” Deltcheva E., et al., Nature 471:602-607(2011); and “A programmable dual-RNA-guided DNA endonuclease in adaptive bacterial immunity.” Jinek M., et al., Science 337:816-821(2012), the entire contents of each of which are incorporated herein by reference). Cas9 orthologs have been described in various species, including, but not limited to, S. pyogenes and S. thermophilus. Additional suitable Cas9 nucleases and sequences will be apparent to those of skill in the art based on this disclosure, and such Cas9 nucleases and sequences include Cas9 sequences from the organisms and loci disclosed in Chylinski, Rhun, and Charpentier, “The tracrRNA and Cas9 families of type II CRISPR-Cas immunity systems” (2013) RNA Biology 10:5, 726-737; the entire contents of which are incorporated herein by reference.

### High Fidelity Cas9 Domains

[0159] Some aspects of the disclosure provide high fidelity Cas9 domains. High fidelity Cas9 domains are known in the art and described, for example, in Kleinstiver, B. P., et al. “High-fidelity CRISPR-Cas9 nucleases with no detectable genome-wide off-target effects.” Nature 529, 490-495 (2016); and Slaymaker, I. M., et al. “Rationally engineered Cas9 nucleases with improved specificity.” Science 351, 84-88 (2015); the entire contents of each of which are incorporated herein by reference. An Exemplary high fidelity Cas9 domain is provided in the Sequence Listing as SEQ ID NO: 233. In some embodiments, high fidelity Cas9 domains are engineered Cas9 domains comprising one or more mutations that decrease electrostatic interactions between the Cas9 domain and the sugar-phosphate backbone of a DNA, relative to a corresponding wild-type Cas9 domain. High fidelity Cas9 domains that have decreased electrostatic interactions with the sugar-phosphate backbone of DNA have less off-target effects. In some embodiments, the Cas9 domain (e.g., a wild type Cas9 domain (SEQ ID NOs: 197 and 200) comprises one or more mutations that decrease the association between the Cas9 domain and the sugar-phosphate backbone of a DNA. In some embodiments, a Cas9 domain comprises one or more mutations that decreases the association between the Cas9 domain and the sugar-phosphate backbone of DNA by at least 1%, at least 2%, at least 3%, at least 4%, at least 5%, at least 10%, at least 15%, at least 20%, at least 25%, at least 30%, at least 35%, at least 40%, at least 45%, at least 50%, at least 55%, at least 60%, at least 65%, or at least 70%.

[0160] In some embodiments, any of the Cas9 fusion proteins provided herein comprise one or more of a D10A, N497X, a R661X, a Q695X, and/or a Q926X mutation, or a corresponding mutation in any of the amino acid sequences provided herein, wherein X is any amino acid. In some embodiments, the high fidelity Cas9 enzyme is SpCas9 (K855A), eSpCas9 (1.1), SpCas9-HF1, or hyper accurate Cas9 variant (HypaCas9). In some embodiments, the modified Cas9 eSpCas9 (1.1) contains alanine substitutions that weaken the interactions between the HNH/RuvC groove and the non-target DNA strand, preventing strand separation and cutting at off-target sites. Similarly, SpCas9-HF1 lowers off-target editing through alanine substitutions that disrupt Cas9's interactions with the DNA phosphate backbone. HypaCas9 contains mutations (SpCas9 N692A/M694A/Q695A/H698A) in the REC3 domain that increase Cas9 proofreading and target discrimination. All three high fidelity enzymes generate less off-target editing than wildtype Cas9.

Cas9 Domains with Reduced Exclusivity

[0161] Typically, Cas9 proteins, such as Cas9 from S. pyogenes (spCas9), require a “protospacer adjacent motif (PAM)” or PAM-like motif, which is a 2-6 base pair DNA sequence immediately following the DNA sequence targeted by the Cas9 nuclease in the CRISPR bacterial adaptive immune system. The presence of an NGG PAM sequence is required to bind a particular nucleic acid region, where the “N” in “NGG” is adenosine (A), thymidine (T), or cytosine (C), and the G is guanosine. This may limit the ability to edit desired bases within a genome. In some embodiments, the base editing fusion proteins provided herein may need to be placed at a precise location, for example a region comprising a target base that is upstream of the PAM. See e.g., Komor, A. C., et al., “Programmable editing of a target base in genomic DNA without double-stranded DNA cleavage” Nature 533, 420-424 (2016), the entire contents of which are hereby incorporated by reference. Exemplary polypeptide sequences for spCas9 proteins capable of binding a PAM sequence are provided in the Sequence Listing as SEQ ID NOs: 197, 201, and 234-237. Accordingly, in some embodiments, any of the fusion proteins provided herein may contain a Cas9 domain that is capable of binding a nucleotide sequence that does not contain a canonical (e.g., NGG) PAM sequence. Cas9 domains that bind to non-canonical PAM sequences have been described in the art and would be apparent to the skilled artisan. For example, Cas9 domains that bind non-canonical PAM sequences have been described in Kleinstiver, B. P., et al., “Engineered CRISPR-Cas9 nucleases with altered PAM specificities” Nature 523, 481-485 (2015); and Kleinstiver, B. P., et al., “Broadening the targeting range of Staphylococcus aureus CRISPR-Cas9 by modifying PAM recognition” Nature Biotechnology 33, 1293-1298 (2015); the entire contents of each are hereby incorporated by reference.

### Nickases

[0162] In some embodiments, the polynucleotide programmable nucleotide binding domain can comprise a nickase domain. Herein the term “nickase” refers to a polynucleotide programmable nucleotide binding domain comprising a nuclease domain that is capable of cleaving only one strand of the two strands in a duplexed nucleic acid molecule (e.g., DNA). In some embodiments, a nickase can be derived from a fully catalytically active (e.g., natural) form of a polynucleotide programmable nucleotide binding domain by introducing one or more mutations into the active polynucleotide programmable nucleotide binding domain. For example, where a polynucleotide programmable nucleotide binding domain comprises a nickase domain derived from Cas9, the Cas9-derived nickase domain can include a D10A mutation and a histidine at position 840. In such embodiments, the residue H840 retains catalytic activity and can thereby cleave a single strand of the nucleic acid duplex. In another example, a Cas9-derived nickase domain can comprise an H840A mutation, while the amino acid residue at position 10 remains a D. In some embodiments, a nickase can be derived from a fully catalytically active (e.g. natural) form of a polynucleotide programmable nucleotide binding domain by removing all or a portion of a nuclease domain that is not required for the nickase activity. For example, where a polynucleotide programmable nucleotide binding domain comprises a nickase domain derived from Cas9, the Cas9-derived nickase domain can comprise a deletion of all or a portion of the RuvC domain or the HNH domain.

[0163] In some embodiments, wild-type Cas9 corresponds to, or comprises the following amino acid sequence:

(SEQ ID NO: 197)
[sequence omitted]

(single underline: HNH domain; double underline: RuvC domain).

[0164] In some embodiments, the strand of a nucleic acid duplex target polynucleotide sequence that is cleaved by a base editor comprising a nickase domain (e.g., Cas9-derived nickase domain, Cas12-derived nickase domain) is the strand that is not edited by the base editor (i.e., the strand that is cleaved by the base editor is opposite to a strand comprising a base to be edited). In other embodiments, a base editor comprising a nickase domain (e.g., Cas9-derived nickase domain, Cas12-derived nickase domain) can cleave the strand of a DNA molecule which is being targeted for editing. In such embodiments, the non-targeted strand is not cleaved.

In some embodiments, a Cas9 nuclease has an inactive (e.g., an inactivated) DNA cleavage domain, that is, the Cas9 is a nickase, referred to as an “nCas9” protein (for “nickase” Cas9). The Cas9 nickase may be a Cas9 protein that is capable of cleaving only one strand of a duplexed nucleic acid molecule (e.g., a duplexed DNA molecule). In some embodiments the Cas9 nickase cleaves the target strand of a duplexed nucleic acid molecule, meaning that the Cas9 nickase cleaves the strand that is base paired to (complementary to) a gRNA (e.g., an sgRNA) that is bound to the Cas9. In some embodiments, a Cas9 nickase comprises a D10A mutation and has a histidine at position 840. In some embodiments the Cas9 nickase cleaves the non-target, non-base-edited strand of a duplexed nucleic acid molecule, meaning that the Cas9 nickase cleaves the strand that is not base paired to a gRNA (e.g., an sgRNA) that is bound to the Cas9. In some embodiments, a Cas9 nickase comprises an H840A mutation and has an aspartic acid residue at position 10, or a corresponding mutation. In some embodiments the Cas9 nickase comprises an amino acid sequence that is at least 60%, at least 65%, at least 70%, at least 75%, at least 80%, at least 85%, at least 90%, at least 95%, at least 96%, at least 97%, at least 98%, at least 99%, or at least 99.5% identical to any one of the Cas9 nickases provided herein. Additional suitable Cas9 nickases will be apparent to those of skill in the art based on this disclosure and knowledge in the field, and are within the scope of this disclosure.

[0165] The amino acid sequence of an exemplary catalytically Cas9 nickase (nCas9) is as follows:

(SEQ ID NO: 201)
MDKKYSIGLAIGTNSVGWAVITDEYKVPSKKFKVLGNTDRHSIKKNLIGALLFDSGETAEATRL
KRTARRRYTRRKNRICYLQEIFSNEMAKVDDSFFHRLEESFLVEEDKKHERHPIFGNIVDEVAY
HEKYPTIYHLRKKLVDSTDKADLRLIYLALAHMIKFRGHFLIEGDLNPDNSDVDKLFIQLVQTY
NQLFEENPINASGVDAKAILSARLSKSRRLENLIAQLPGEKKNGLFGNLIALSLGLTPNFKSNF
DLAEDAKLQLSKDTYDDDLDNLLAQIGDQYADLFLAAKNLSDAILLSDILRVNTEITKAPLSAS
MIKRYDEHHQDLTLLKALVRQQLPEKYKEIFFDQSKNGYAGYIDGGASQEEFYKFIKPILEKMD
GTEELLVKLNREDLLRKQRTFDNGSIPHQIHLGELHAILRRQEDFYPFLKDNREKIEKILTFRI
PYYVGPLARGNSRFAWMTRKSEETITPWNFEEVVDKGASAQSFIERMTNFDKNLPNEKVLPKHS
LLYEYFTVYNELTKVKYVTEGMRKPAFLSGEQKKAIVDLLFKTNRKVTVKQLKEDYFKKIECFD
SVEISGVEDRFNASLGTYHDLLKIIKDKDFLDNEENEDILEDIVLTLTLFEDREMIEERLKTYA
HLFDDKVMKQLKRRRYTGWGRLSRKLINGIRDKQSGKTILDFLKSDGFANRNFMQLIHDDSLTF
KEDIQKAQVSGQGDSLHEHIANLAGSPAIKKGILQTVKVVDELVKVMGRHKPENIVIEMARENQ
TTQKGQKNSRERMKRIEEGIKELGSQILKEHPVENTQLQNEKLYLYYLQNGRDMYVDQELDINR
LSDYDVDHIVPQSFLKDDSIDNKVLTRSDKNRGKSDNVPSEEVVKKMKNYWRQLLNAKLITQRK
FDNLTKAERGGLSELDKAGFIKRQLVETRQITKHVAQILDSRMNTKYDENDKLIREVKVITLKS
KLVSDFRKDFQFYKVREINNYHHAHDAYLNAVVGTALIKKYPKLESEFVYGDYKVYDVRKMIAK
SEQEIGKATAKYFFYSNIMNFFKTEITLANGEIRKRPLIETNGETGEIVWDKGRDFATVRKVLS
MPQVNIVKKTEVQTGGFSKESILPKRNSDKLIARKKDWDPKKYGGFDSPTVAYSVLVVAKVEKG
KSKKLKSVKELLGITIMERSSFEKNPIDFLEAKGYKEVKKDLIIKLPKYSLFELENGRKRMLAS
AGELQKGNELALPSKYVNFLYLASHYEKLKGSPEDNEQKQLFVEQHKHYLDEIIEQISEFSKRV
ILADANLDKVLSAYNKHRDKPIREQAENIIHLFTLTNLGAPAAFKYFDTTIDRKRYTSTKEVLD
ATLIHQSITGLYETRIDLSQLGGD

[0166] The Cas9 nuclease has two functional endonuclease domains: RuvC and HNH. Cas9 undergoes a conformational change upon target binding that positions the nuclease domains to cleave opposite strands of the target DNA. The end result of Cas9-mediated DNA cleavage is a double-strand break (DSB) within the target DNA (˜3-4 nucleotides upstream of the PAM sequence). The resulting DSB is then repaired by one of two general repair pathways: (1) the efficient but error-prone non-homologous end joining (NHEJ) pathway; or (2) the less efficient but high-fidelity homology directed repair (HDR) pathway.

[0167] The “efficiency” of non-homologous end joining (NHEJ) and/or homology directed repair (HDR) can be calculated by any convenient method. For example, in some embodiments, efficiency can be expressed in terms of percentage of successful HDR. For example, a surveyor nuclease assay can be used to generate cleavage products and the ratio of products to substrate can be used to calculate the percentage. For example, a surveyor nuclease enzyme can be used that directly cleaves DNA containing a newly integrated restriction sequence as the result of successful HDR. More cleaved substrate indicates a greater percent HDR (a greater efficiency of HDR). As an illustrative example, a fraction (percentage) of HDR can be calculated using the following equation [(cleavage products)/(substrate plus cleavage products)] (e.g., (b+c)/(a+b+c), where “a” is the band intensity of DNA substrate and “b” and “c” are the cleavage products).

[0168] In some embodiments, efficiency can be expressed in terms of percentage of successful NHEJ. For example, a T7 endonuclease I assay can be used to generate cleavage products and the ratio of products to substrate can be used to calculate the percentage NHEJ. T7 endonuclease I cleaves mismatched heteroduplex DNA which arises from hybridization of wild-type and mutant DNA strands (NHEJ generates small random insertions or deletions (indels) at the site of the original break). More cleavage indicates a greater percent NHEJ (a greater efficiency of NHEJ). As an illustrative example, a fraction (percentage) of NHEJ can be calculated using the following equation: (1−(1−(b+c)/(a+b+c))^{1/2})×100, where “a” is the band intensity of DNA substrate and “b” and “c” are the cleavage products (Ran et. al., Cell. 2013 Sep. 12; 154(6):1380-9; and Ran et al., Nat Protoc. 2013 November; 8(11): 2281-2308).

[0169] The NHEJ repair pathway is the most active repair mechanism, and it frequently causes small nucleotide insertions or deletions (indels) at the DSB site. The randomness of NHEJ-mediated DSB repair has important practical implications, because a population of cells expressing Cas9 and a gRNA or a guide polynucleotide can result in a diverse array of mutations. In most embodiments, NHEJ gives rise to small indels in the target DNA that result in amino acid deletions, insertions, or frameshift mutations leading to premature stop codons within the open reading frame (ORF) of the targeted gene. The ideal end result is a loss-of-function mutation within the targeted gene.

[0170] While NHEJ-mediated DSB repair often disrupts the open reading frame of the gene, homology directed repair (HDR) can be used to generate specific nucleotide changes ranging from a single nucleotide change to large insertions like the addition of a fluorophore or tag.

[0171] In order to utilize HDR for gene editing, a DNA repair template containing the desired sequence can be delivered into the cell type of interest with the gRNA(s) and Cas9 or Cas9 nickase. The repair template can contain the desired edit as well as additional homologous sequence immediately upstream and downstream of the target (termed left & right homology arms). The length of each homology arm can be dependent on the size of the change being introduced, with larger insertions requiring longer homology arms. The repair template can be a single-stranded oligonucleotide, double-stranded oligonucleotide, or a double-stranded DNA plasmid. The efficiency of HDR is generally low (<10% of modified alleles) even in cells that express Cas9, gRNA and an exogenous repair template. The efficiency of HDR can be enhanced by synchronizing the cells, since HDR takes place during the S and G2 phases of the cell cycle. Chemically or genetically inhibiting genes involved in NHEJ can also increase HDR frequency.

[0172] In some embodiments, Cas9 is a modified Cas9. A given gRNA targeting sequence can have additional sites throughout the genome where partial homology exists. These sites are called off-targets and need to be considered when designing a gRNA. In addition to optimizing gRNA design, CRISPR specificity can also be increased through modifications to Cas9. Cas9 generates double-strand breaks (DSBs) through the combined activity of two nuclease domains, RuvC and HNH. Cas9 nickase, a D10A mutant of SpCas9, retains one nuclease domain and generates a DNA nick rather than a DSB. The nickase system can also be combined with HDR-mediated gene editing for specific gene edits.

### Catalytically Dead Nucleases

[0173] Also provided herein are base editors comprising a polynucleotide programmable nucleotide binding domain which is catalytically dead (i.e., incapable of cleaving a target polynucleotide sequence). Herein the terms “catalytically dead” and “nuclease dead” are used interchangeably to refer to a polynucleotide programmable nucleotide binding domain which has one or more mutations and/or deletions resulting in its inability to cleave a strand of a nucleic acid. In some embodiments, a catalytically dead polynucleotide programmable nucleotide binding domain base editor can lack nuclease activity as a result of specific point mutations in one or more nuclease domains. For example, in the case of a base editor comprising a Cas9 domain, the Cas9 can comprise both a D10A mutation and an H840A mutation. Such mutations inactivate both nuclease domains, thereby resulting in the loss of nuclease activity. In other embodiments, a catalytically dead polynucleotide programmable nucleotide binding domain can comprise one or more deletions of all or a portion of a catalytic domain (e.g., RuvC1 and/or HNH domains). In further embodiments, a catalytically dead polynucleotide programmable nucleotide binding domain comprises a point mutation (e.g., D10A or H840A) as well as a deletion of all or a portion of a nuclease domain. dCas9 domains are known in the art and described, for example, in Qi et al., “Repurposing CRISPR as an RNA-guided platform for sequence-specific control of gene expression.” Cell. 2013; 152(5):1173-83, the entire contents of which are incorporated herein by reference.

[0174] Additional suitable nuclease-inactive dCas9 domains will be apparent to those of skill in the art based on this disclosure and knowledge in the field, and are within the scope of this disclosure. Such additional exemplary suitable nuclease-inactive Cas9 domains include, but are not limited to, D10A/H840A, D10A/D839A/H840A, and D10A/D839A/H840A/N863A mutant domains (See, e.g., Prashant et al., CAS9 transcriptional activators for target specificity screening and paired nickases for cooperative genome engineering. Nature Biotechnology. 2013; 31(9): 833-838, the entire contents of which are incorporated herein by reference).

[0175] In some embodiments, dCas9 corresponds to, or comprises in part or in whole, a Cas9 amino acid sequence having one or more mutations that inactivate the Cas9 nuclease activity. In some embodiments, the nuclease-inactive dCas9 domain comprises a D10X mutation and a H840X mutation of the amino acid sequence set forth herein, or a corresponding mutation in any of the amino acid sequences provided herein, wherein X is any amino acid change. In some embodiments, the nuclease-inactive dCas9 domain comprises a D10A mutation and a H840A mutation of the amino acid sequence set forth herein, or a corresponding mutation in any of the amino acid sequences provided herein. In some embodiments, a nuclease-inactive Cas9 domain comprises the amino acid sequence set forth in Cloning vector pPlatTET-gRNA2 (Accession No. BAV54124).

[0176] In some embodiments, a variant Cas9 protein can cleave the complementary strand of a guide target sequence but has reduced ability to cleave the non-complementary strand of a double stranded guide target sequence. For example, the variant Cas9 protein can have a mutation (amino acid substitution) that reduces the function of the RuvC domain. As a non-limiting example, in some embodiments, a variant Cas9 protein has a D10A (aspartate to alanine at amino acid position 10) and can therefore cleave the complementary strand of a double stranded guide target sequence but has reduced ability to cleave the non-complementary strand of a double stranded guide target sequence (thus resulting in a single strand break (SSB) instead of a double strand break (DSB) when the variant Cas9 protein cleaves a double stranded target nucleic acid) (see, for example, Jinek et al., Science. 2012 Aug. 17; 337(6096):816-21).

[0177] In some embodiments, a variant Cas9 protein can cleave the non-complementary strand of a double stranded guide target sequence but has reduced ability to cleave the complementary strand of the guide target sequence. For example, the variant Cas9 protein can have a mutation (amino acid substitution) that reduces the function of the HNH domain (RuvC/HNH/RuvC domain motifs). As a non-limiting example, in some embodiments, the variant Cas9 protein has an H840A (histidine to alanine at amino acid position 840) mutation and can therefore cleave the non-complementary strand of the guide target sequence but has reduced ability to cleave the complementary strand of the guide target sequence (thus resulting in a SSB instead of a DSB when the variant Cas9 protein cleaves a double stranded guide target sequence). Such a Cas9 protein has a reduced ability to cleave a guide target sequence (e.g., a single stranded guide target sequence) but retains the ability to bind a guide target sequence (e.g., a single stranded guide target sequence).

[0178] As another non-limiting example, in some embodiments, the variant Cas9 protein harbors W476A and W1126A mutations such that the polypeptide has a reduced ability to cleave a target DNA. Such a Cas9 protein has a reduced ability to cleave a target DNA (e.g., a single stranded target DNA) but retains the ability to bind a target DNA (e.g., a single stranded target DNA).

[0179] As another non-limiting example, in some embodiments, the variant Cas9 protein harbors P475A, W476A, N477A, D1125A, WI 126A, and D1127A mutations such that the polypeptide has a reduced ability to cleave a target DNA. Such a Cas9 protein has a reduced ability to cleave a target DNA (e.g., a single stranded target DNA) but retains the ability to bind a target DNA (e.g., a single stranded target DNA).

[0180] As another non-limiting example, in some embodiments, the variant Cas9 protein harbors H840A, W476A, and W1126A, mutations such that the polypeptide has a reduced ability to cleave a target DNA. Such a Cas9 protein has a reduced ability to cleave a target DNA (e.g., a single stranded target DNA) but retains the ability to bind a target DNA (e.g., a single stranded target DNA). As another non-limiting example, in some embodiments, the variant Cas9 protein harbors H840A, D10A, W476A, and W1126A, mutations such that the polypeptide has a reduced ability to cleave a target DNA. Such a Cas9 protein has a reduced ability to cleave a target DNA (e.g., a single stranded target DNA) but retains the ability to bind a target DNA (e.g., a single stranded target DNA). In some embodiments, the variant Cas9 has restored catalytic His residue at position 840 in the Cas9 HNH domain (A840H).

[0181] As another non-limiting example, in some embodiments, the variant Cas9 protein harbors, H840A, P475A, W476A, N477A, D1125A, W1126A, and D1127A mutations such that the polypeptide has a reduced ability to cleave a target DNA. Such a Cas9 protein has a reduced ability to cleave a target DNA (e.g., a single stranded target DNA) but retains the ability to bind a target DNA (e.g., a single stranded target DNA). As another non-limiting example, in some embodiments, the variant Cas9 protein harbors D10A, H840A, P475A, W476A, N477A, D1125A, W1126A, and D1127A mutations such that the polypeptide has a reduced ability to cleave a target DNA. Such a Cas9 protein has a reduced ability to cleave a target DNA (e.g., a single stranded target DNA) but retains the ability to bind a target DNA (e.g., a single stranded target DNA). In some embodiments, when a variant Cas9 protein harbors W476A and WI 126A mutations or when the variant Cas9 protein harbors P475A, W476A, N477A, D1125A, WI 126A, and D1127A mutations, the variant Cas9 protein does not bind efficiently to a PAM sequence. Thus, in some such embodiments, when such a variant Cas9 protein is used in a method of binding, the method does not require a PAM sequence. In other words, in some embodiments, when such a variant Cas9 protein is used in a method of binding, the method can include a guide RNA, but the method can be performed in the absence of a PAM sequence (and the specificity of binding is therefore provided by the targeting segment of the guide RNA). Other residues can be mutated to achieve the above effects (i.e., inactivate one or the other nuclease portions). As non-limiting examples, residues D10, G12, G17, E762, H840, N854, N863, H982, H983, A984, D986, and/or A987 can be altered (i.e., substituted). Also, mutations other than alanine substitutions are suitable.

[0182] In some embodiments, a variant Cas9 protein that has reduced catalytic activity (e.g., when a Cas9 protein has a D10, G12, G17, E762, H840, N854, N863, H982, H983, A984, D986, and/or a A987 mutation, e.g., D10A, G12A, G17A, E762A, H840A, N854A, N863A, H982A, H983A, A984A, and/or D986A), the variant Cas9 protein can still bind to target DNA in a site-specific manner (because it is still guided to a target DNA sequence by a guide RNA) as long as it retains the ability to interact with the guide RNA.

[0183] In some embodiments, the variant Cas protein can be spCas9, spCas9-VRQR, spCas9-VRER, xCas9 (sp), saCas9, saCas9-KKH, spCas9-MQKSER, spCas9-LRKIQK, or spCas9-LRVSQL.

[0184] In some embodiments, the Cas9 domain is a Cas9 domain from Staphylococcus aureus (SaCas9). In some embodiments, the SaCas9 domain is a nuclease active SaCas9, a nuclease inactive SaCas9 (SaCas9d), or a SaCas9 nickase (SaCas9n). In some embodiments, the SaCas9 comprises a N579A mutation, or a corresponding mutation in any of the amino acid sequences provided in the Sequence Listing submitted herewith.

[0185] In some embodiments, the SaCas9 domain, the SaCas9d domain, or the SaCas9n domain can bind to a nucleic acid sequence having a non-canonical PAM. In some embodiments, the SaCas9 domain, the SaCas9d domain, or the SaCas9n domain can bind to a nucleic acid sequence having a NNGRRT or a NNGRRV PAM sequence. In some embodiments, the SaCas9 domain comprises one or more of a E781X, a N967X, and a R1014X mutation, or a corresponding mutation in any of the amino acid sequences provided herein, wherein X is any amino acid. In some embodiments, the SaCas9 domain comprises one or more of a E781K, a N967K, and a R1014H mutation, or one or more corresponding mutation in any of the amino acid sequences provided herein. In some embodiments, the SaCas9 domain comprises a E781K, a N967K, or a R1014H mutation, or corresponding mutations in any of the amino acid sequences provided herein.

[0186] In some embodiments, one of the Cas9 domains present in the fusion protein may be replaced with a guide nucleotide sequence-programmable DNA-binding protein domain that has no requirements for a PAM sequence. In some embodiments, the Cas9 is an SaCas9. Residue A579 of SaCas9 can be mutated from N579 to yield a SaCas9 nickase. Residues K781, K967, and H1014 can be mutated from E781, N967, and R1014 to yield a SaKKH Cas9.

[0187] In some embodiments, a modified SpCas9 including amino acid substitutions D1135M, S1136Q, G1218K, E1219F, A1322R, D1332A, R1335E, and T1337R (SpCas9-MQKFRAER) and having specificity for the altered PAM 5′-NGC-3′ was used.

[0188] Alternatives to S. pyogenes Cas9 can include RNA-guided endonucleases from the Cpf1 family that display cleavage activity in mammalian cells. CRISPR from Prevotella and Francisella 1 (CRISPR/Cpf1) is a DNA-editing technology analogous to the CRISPR/Cas9 system. Cpf1 is an RNA-guided endonuclease of a class II CRISPR/Cas system. This acquired immune mechanism is found in Prevotella and Francisella bacteria. Cpf1 genes are associated with the CRISPR locus, coding for an endonuclease that use a guide RNA to find and cleave viral DNA. Cpf1 is a smaller and simpler endonuclease than Cas9, overcoming some of the CRISPR/Cas9 system limitations. Unlike Cas9 nucleases, the result of Cpf1-mediated DNA cleavage is a double-strand break with a short 3′ overhang. Cpf1's staggered cleavage pattern can open up the possibility of directional gene transfer, analogous to traditional restriction enzyme cloning, which can increase the efficiency of gene editing. Like the Cas9 variants and orthologues described above, Cpf1 can also expand the number of sites that can be targeted by CRISPR to AT-rich regions or AT-rich genomes that lack the NGG PAM sites favored by SpCas9. The Cpf1 locus contains a mixed alpha/beta domain, a RuvC-I followed by a helical region, a RuvC-II and a zinc finger-like domain. The Cpf1 protein has a RuvC-like endonuclease domain that is similar to the RuvC domain of Cas9.

[0189] Furthermore, Cpf1, unlike Cas9, does not have a HNH endonuclease domain, and the N-terminal of Cpf1 does not have the alpha-helical recognition lobe of Cas9. Cpf1 CRISPR-Cas domain architecture shows that Cpf1 is functionally unique, being classified as Class 2, type V CRISPR system. The Cpf1 loci encode Cas1, Cas2 and Cas4 proteins that are more similar to types I and III than type II systems. Functional Cpf1 does not require the trans-activating CRISPR RNA (tracrRNA), therefore, only CRISPR (crRNA) is required. This benefits genome editing because Cpf1 is not only smaller than Cas9, but also it has a smaller sgRNA molecule (approximately half as many nucleotides as Cas9). The Cpf1-crRNA complex cleaves target DNA or RNA by identification of a protospacer adjacent motif 5′-YTN-3′ or 5′-TTN-3′ in contrast to the G-rich PAM targeted by Cas9. After identification of PAM, Cpf1 introduces a sticky-end-like DNA double-stranded break having an overhang of 4 or 5 nucleotides.

[0190] In some embodiments, the Cas9 is a Cas9 variant having specificity for an altered PAM sequence. In some embodiments, the Additional Cas9 variants and PAM sequences are described in Miller, S. M., et al. Continuous evolution of SpCas9 variants compatible with non-G PAMs, Nat. Biotechnol. (2020), the entirety of which is incorporated herein by reference. in some embodiments, a Cas9 variate have no specific PAM requirements. In some embodiments, a Cas9 variant, e.g. a SpCas9 variant has specificity for a NRNH PAM, wherein R is A or G and H is A, C, or T. In some embodiments, the SpCas9 variant has specificity for a PAM sequence AAA, TAA, CAA, GAA, TAT, GAT, or CAC. In some embodiments, the SpCas9 variant comprises an amino acid substitution at position 1114, 1134, 1135, 1137, 1139, 1151, 1180, 1188, 1211, 1218, 1219, 1221, 1249, 1256, 1264, 1290, 1318, 1317, 1320, 1321, 1323, 1332, 1333, 1335, 1337, or 1339 or a corresponding position thereof. In some embodiments, the SpCas9 variant comprises an amino acid substitution at position 1114, 1135, 1218, 1219, 1221, 1249, 1320, 1321, 1323, 1332, 1333, 1335, or 1337 or a corresponding position thereof. In some embodiments, the SpCas9 variant comprises an amino acid substitution at position 1114, 1134, 1135, 1137, 1139, 1151, 1180, 1188, 1211, 1219, 1221, 1256, 1264, 1290, 1318, 1317, 1320, 1323, 1333 or a corresponding position thereof. In some embodiments, the SpCas9 variant comprises an amino acid substitution at position 1114, 1131, 1135, 1150, 1156, 1180, 1191, 1218, 1219, 1221, 1227, 1249, 1253, 1286, 1293, 1320, 1321, 1332, 1335, 1339 or a corresponding position thereof. In some embodiments, the SpCas9 variant comprises an amino acid substitution at position 1114, 1127, 1135, 1180, 1207, 1219, 1234, 1286, 1301, 1332, 1335, 1337, 1338, 1349 ora corresponding position thereof. Exemplary amino acid substitutions and PAM specificity of SpCas9 variants are shown in Tables 2 and 3A-3C.

TABLE 2
SpCas9 Variants and PAM specificity

| | SpCas9 amino acid position | | | | | | | | | | | | |
|---|---|---|---|---|---|---|---|---|---|---|---|---|---|
| | 1114 | 1135 | 1218 | 1219 | 1221 | 1249 | 1320 | 1321 | 1323 | 1332 | 1333 | 1335 | 1337 |
| PAM | R | D | G | E | Q | P | A | P | A | D | R | R | T |
| AAA | | N | | V | H | | | | | | G | | |
| AAA | | N | | V | H | | | | | | G | | |
| AAA | | | | V | | | | | | | G | | |
| TAA | G | N | | V | | | | | | | I | | |
| TAA | | N | | V | | | | | | | I | | A |
| TAA | G | N | | V | | | | | | | I | | A |
| CAA | | | | V | | | | | | | K | | |
| CAA | | N | | V | | | | | | | K | | |
| CAA | | N | | V | | | | | | | K | | |
| GAA | | | | V | H | | V | | | | K | | |
| GAA | | N | | V | | | V | | | | K | | |
| GAA | | | | V | H | | V | | | | K | | |
| TAT | | | S | V | H | S | | S | | | | L | |
| TAT | | | S | V | H | S | | S | | | | L | |
| TAT | | | S | V | H | S | | S | | | | L | |
| GAT | | | | V | | | | | | | I | | |
| GAT | | | | V | | | | | D | | | Q | |
| GAT | | | | V | | | | | D | | | Q | |
| CAC | | | | V | | | | | | N | | Q | N |
| CAC | | N | | V | | | | | | | | Q | N |
| CAC | | | | V | | | | | | N | | Q | N |

TABLE 3A
SpCas9 Variants and PAM specificity

| | SpCas9 amino acid position | | | | | | | | | | | | | | | | | | |
|---|---|---|---|---|---|---|---|---|---|---|---|---|---|---|---|---|---|---|---|
| | 1114 | 1134 | 1135 | 1137 | 1139 | 1151 | 1180 | 1188 | 1211 | 1219 | 1221 | 1256 | 1264 | 1290 | 1318 | 1317 | 1320 | 1323 | 1333 |
| PAM | R | F | D | P | V | K | D | K | K | E | Q | Q | H | V | L | N | A | A | R |
| GAA | | | | | | | | | | V | H | | | | | | V | | K |
| GAA | | | N | S | | | | | | V | | | | | | | V | D | K |
| GAA | | | N | | | | | | | V | H | | Y | | | | V | | K |
| CAA | | | N | | | | | | | V | H | | Y | | | | V | | K |
| CAA | G | | N | S | | | | | | V | H | | Y | | | | V | | K |
| CAA | | | N | | | | | R | | V | H | | | | | | V | | K |
| CAA | | | N | | | | G | | R | V | H | | Y | | | | V | | K |
| CAA | | | N | | | | | | | V | H | | Y | | | | V | | K |
| AAA | | | N | | | | G | | | V | H | R | Y | | | | V | D | K |
| CAA | G | | N | | | | G | | | V | H | | Y | | | | V | D | K |
| CAA | | L | N | | | | G | | | V | H | | Y | | | T | V | D | K |
| TAA | G | | N | | | | G | | | V | H | | Y | G | S | | V | D | K |
| TAA | G | | N | | | E | G | | | V | H | | Y | | S | | V | | K |
| TAA | G | | N | | | | G | | | V | H | | Y | | S | | V | D | K |
| TAA | G | | N | | | | G | | R | V | H | | | | | | V | | K |
| TAA | | | N | | | | G | | R | V | H | | Y | | | | V | | K |
| TAA | G | | N | | A | | G | | | V | H | | | | | | V | | K |
| TAA | G | | N | | | | | | | V | H | | | | | | V | | K |

TABLE 3B
SpCas9 Variants and PAM specificity

| | SpCas9 amino acid position | | | | | | | | | | |
|---|---|---|---|---|---|---|---|---|---|---|---|
| | 1114 | 1131 | 1135 | 1150 | 1156 | 1180 | 1191 | 1218 | 1219 | 1221 | 1227 |
| PAM | R | Y | D | E | K | D | K | G | E | Q | A |
| SacB.TAT | | | N | | | | N | | V | H | |
| SacB.TAT | | | N | | | | | S | V | H | |
| AAT | | | N | | | | | S | V | H | V |
| TAT | G | | N | | | G | | S | V | H | |
| TAT | G | | N | | | G | | S | V | H | |
| TAT | G | C | N | | | G | | S | V | H | |
| TAT | G | C | N | | | G | | S | V | H | |
| TAT | G | C | N | | | G | | S | V | H | |
| TAT | G | C | N | | E | G | | S | V | H | |
| TAT | G | C | N | V | | G | | S | V | H | |
| TAT | | C | N | | | G | | S | V | H | |
| TAT | G | C | N | | | G | | S | V | H | |

| | SpCas9 amino acid position | | | | | | | | |
|---|---|---|---|---|---|---|---|---|---|
| | 1249 | 1253 | 1286 | 1293 | 1320 | 1321 | 1332 | 1335 | 1339 |
| PAM | P | E | N | A | A | P | D | R | T |
| SacB.TAT | | | | | V | S | | L | |
| SacB.TAT | S | | | | | S | G | L | |
| AAT | S | | K | T | | S | G | L | I |
| TAT | S | K | | | | S | G | L | |
| TAT | S | | | | | S | G | L | |
| TAT | S | | | | | S | G | L | |
| TAT | S | | | | | S | G | L | |
| TAT | S | | | | | S | G | L | |
| TAT | S | | | | | S | G | L | |
| TAT | S | | | | | S | G | L | |
| TAT | S | | | | | S | G | L | |
| TAT | S | | | | | S | G | L | |

TABLE 3C
SpCas9 Variants and PAM specificity

| | SpCas9 amino acid position | | | | | | | | | | | | | |
|---|---|---|---|---|---|---|---|---|---|---|---|---|---|---|
| | 1114 | 1127 | 1135 | 1180 | 1207 | 1219 | 1234 | 1286 | 1301 | 1332 | 1335 | 1337 | 1338 | 1349 |
| PAM | R | D | D | D | E | E | N | N | P | D | R | T | S | H |

| | | | | | | | | | | | | | |
|---|---|---|---|---|---|---|---|---|---|---|---|---|---|
| SacB.CAC | | | N | | | V | | | N | Q | N | | |
| AAC | G | | N | | | V | | | N | Q | N | | |
| AAC | G | | N | | | V | | | N | Q | N | | |
| TAC | G | | N | | | V | | | N | Q | N | | |
| TAC | G | | N | | | V | | H | N | Q | N | | |
| TAC | G | | N | | G | V | D | H | N | Q | N | | |
| TAC | G | | N | | | V | | | N | Q | N | | |
| TAC | G | G | N | E | | V | | H | N | Q | N | | |
| TAC | G | | N | | | V | | H | N | Q | N | | |
| TAC | G | | N | | | V | | | N | Q | N | T | R |

[0191] Further exemplary Cas9 (e.g., SaCas9) polypeptides with modified PAM recognition are described in Kleinstiver, et al. “Broadening the targeting range of Staphylococcus aureus CRISPR-Cas9 by modifying PAM recognition,” Nature Biotechnology, 33:1293-1298 (2015) DOI: 10.1038/nbt.3404, the disclosure of which is incorporated herein by reference in its entirety for all purposes. In some embodiments, a Cas9 variant (e.g., a SaCas9 variant) comprising one or more of the alterations E782K, N929R, N968K, and/or R1015H has specificity for, or is associated with increased editing activities relative to a reference polypeptide (e.g., SaCas9) at an NNNRRT or NNHRRT PAM sequence, where N represents any nucleotide, H represents any nucleotide other than G (i.e., “not G”), and R represents a purine. In embodiments, the Cas9 variant (e.g., a SaCas9 variant) comprises the alterations E782K, N968K, and R1015H or the alterations E782K, K929R, and R1015H.

[0192] In some embodiments, the nucleic acid programmable DNA binding protein (napDNAbp) is a single effector of a microbial CRISPR-Cas system. Single effectors of microbial CRISPR-Cas systems include, without limitation, Cas9, Cpf1, Cas12b/C2c1, and Cas12c/C2c3. Typically, microbial CRISPR-Cas systems are divided into Class 1 and Class 2 systems. Class 1 systems have multisubunit effector complexes, while Class 2 systems have a single protein effector. For example, Cas9 and Cpf1 are Class 2 effectors. In addition to Cas9 and Cpf1, three distinct Class 2 CRISPR-Cas systems (Cas12b/C2c1, and Cas12c/C2c3) have been described by Shmakov et al., “Discovery and Functional Characterization of Diverse Class 2 CRISPR Cas Systems”, Mol. Cell, 2015 Nov. 5; 60(3): 385-397, the entire contents of which is hereby incorporated by reference. Effectors of two of the systems, Cas12b/C2c1, and Cas12c/C2c3, contain RuvC-like endonuclease domains related to Cpf1. A third system contains an effector with two predicated HEPN RNase domains. Production of mature CRISPR RNA is tracrRNA-independent, unlike production of CRISPR RNA by Cas12b/C2c1. Cas12b/C2c1 depends on both CRISPR RNA and tracrRNA for DNA cleavage.

[0193] In some embodiments, the napDNAbp is a circular permutant (e.g., SEQ ID NO: 238).

[0194] The crystal structure of Alicyclobacillus acidoterrestris Cas12b/C2c1 (AacC2c1) has been reported in complex with a chimeric single-molecule guide RNA (sgRNA). See e.g., Liu et al., “C2c1-sgRNA Complex Structure Reveals RNA-Guided DNA Cleavage Mechanism”, Mol. Cell, 2017 Jan. 19; 65(2):310-322, the entire contents of which are hereby incorporated by reference. The crystal structure has also been reported in Alicyclobacillus acidoterrestris C2c1 bound to target DNAs as ternary complexes. See e.g., Yang et al., “PAM-dependent Target DNA Recognition and Cleavage by C2C1 CRISPR-Cas endonuclease”, Cell, 2016 Dec. 15; 167(7):1814-1828, the entire contents of which are hereby incorporated by reference. Catalytically competent conformations of AacC2c1, both with target and non-target DNA strands, have been captured independently positioned within a single RuvC catalytic pocket, with Cas12b/C2c1-mediated cleavage resulting in a staggered seven-nucleotide break of target DNA. Structural comparisons between Cas12b/C2c1 ternary complexes and previously identified Cas9 and Cpf1 counterparts demonstrate the diversity of mechanisms used by CRISPR-Cas9 systems.

[0195] In some embodiments, the nucleic acid programmable DNA binding protein (napDNAbp) of any of the fusion proteins provided herein may be a Cas12b/C2c1, or a Cas12c/C2c3 protein. In some embodiments, the napDNAbp is a Cas12b/C2c1 protein. In some embodiments, the napDNAbp is a Cas12c/C2c3 protein. In some embodiments, the napDNAbp comprises an amino acid sequence that is at least 85%, at least 90%, at least 91%, at least 92%, at least 93%, at least 94%, at least 95%, at least 96%, at least 97%, at least 98%, at least 99%, or at ease 99.5% identical to a naturally-occurring Cas12b/C2c1 or Cas12c/C2c3 protein. In some embodiments, the napDNAbp is a naturally-occurring Cas12b/C2c1 or Cas12c/C2c3 protein. In some embodiments, the napDNAbp comprises an amino acid sequence that is at least 85%, at least 90%, at least 91%, at least 92%, at least 93%, at least 94%, at least 95%, at least 96%, at least 97%, at least 98%, at least 99%, or at ease 99.5% identical to any one of the napDNAbp sequences provided herein. It should be appreciated that Cas12b/C2c1 or Cas12c/C2c3 from other bacterial species may also be used in accordance with the present disclosure.

[0196] In some embodiments, a napDNAbp refers to Cas12c. In some embodiments, the Cas12c protein is a Cas12c1 (SEQ ID NO: 239) or a variant of Cas12c1. In some embodiments, the Cas12 protein is a Cas12c2 (SEQ ID NO: 240) or a variant of Cas12c2. In some embodiments, the Cas12 protein is a Cas12c protein from Oleiphilus sp. H10009 (i.e., OspCas12c; SEQ ID NO: 241) or a variant of OspCas12c. These Cas12c molecules have been described in Yan et al., “Functionally Diverse Type V CRISPR-Cas Systems,” Science, 2019 Jan. 4; 363: 88-91; the entire contents of which is hereby incorporated by reference. In some embodiments, the napDNAbp comprises an amino acid sequence that is at least 85%, at least 90%, at least 91%, at least 92%, at least 93%, at least 94%, at least 95%, at least 96%, at least 97%, at least 98%, at least 99%, or at least 99.5% identical to a naturally-occurring Cas12c1, Cas12c2, or OspCas12c protein. In some embodiments, the napDNAbp is a naturally-occurring Cas12c1, Cas12c2, or OspCas12c protein. In some embodiments, the napDNAbp comprises an amino acid sequence that is at least 85%, at least 90%, at least 91%, at least 92%, at least 93%, at least 94%, at least 95%, at least 96%, at least 97%, at least 98%, at least 99%, or at ease 99.5% identical to any Cas12c1, Cas12c2, or OspCas12c protein described herein. It should be appreciated that Cas12c1, Cas12c2, or OspCas12c from other bacterial species may also be used in accordance with the present disclosure.

[0197] In some embodiments, a napDNAbp refers to Cas12g, Cas12h, or Cas12i, which have been described in, for example, Yan et al., “Functionally Diverse Type V CRISPR-Cas Systems,” Science, 2019 Jan. 4; 363: 88-91; the entire contents of each is hereby incorporated by reference. Exemplary Cas12g, Cas12h, and Cas12i polypeptide sequences are provided in the Sequence Listing as SEQ ID NOs: 242-245. By aggregating more than 10 terabytes of sequence data, new classifications of Type V Cas proteins were identified that showed weak similarity to previously characterized Class V protein, including Cas12g, Cas12h, and Cas12i. In some embodiments, the Cas12 protein is a Cas12g or a variant of Cas12g. In some embodiments, the Cas12 protein is a Cas12h or a variant of Cas12h. In some embodiments, the Cas12 protein is a Cas12i or a variant of Cas12i. It should be appreciated that other RNA-guided DNA binding proteins may be used as a napDNAbp, and are within the scope of this disclosure. In some embodiments, the napDNAbp comprises an amino acid sequence that is at least 85%, at least 90%, at least 91%, at least 92%, at least 93%, at least 94%, at least 95%, at least 96%, at least 97%, at least 98%, at least 99%, or at least 99.5% identical to a naturally-occurring Cas12g, Cas12h, or Cas12i protein. In some embodiments, the napDNAbp is a naturally-occurring Cas12g, Cas12h, or Cas12i protein. In some embodiments, the napDNAbp comprises an amino acid sequence that is at least 85%, at least 90%, at least 91%, at least 92%, at least 93%, at least 94%, at least 95%, at least 96%, at least 97%, at least 98%, at least 99%, or at ease 99.5% identical to any Cas12g, Cas12h, or Cas12i protein described herein. It should be appreciated that Cas12g, Cas12h, or Cas12i from other bacterial species may also be used in accordance with the present disclosure. In some embodiments, the Cas12i is a Cas12i1 or a Cas12i2.

[0198] In some embodiments, the nucleic acid programmable DNA binding protein (napDNAbp) of any of the fusion proteins provided herein may be a Cas12j/CasΦ protein. Cas12j/CasΦ is described in Pausch et al., “CRISPR-CasΦ from huge phages is a hypercompact genome editor,” Science, 17 Jul. 2020, Vol. 369, Issue 6501, pp. 333-337, which is incorporated herein by reference in its entirety. In some embodiments, the napDNAbp comprises an amino acid sequence that is at least 85%, at least 90%, at least 91%, at least 92%, at least 93%, at least 94%, at least 95%, at least 96%, at least 97%, at least 98%, at least 99%, or at ease 99.5% identical to a naturally-occurring Cas12j/CasΦ protein. In some embodiments, the napDNAbp is a naturally-occurring Cas12j/CasΦ protein. In some embodiments, the napDNAbp is a nuclease inactive (“dead”) Cas12j/CasΦ protein. It should be appreciated that Cas12j/CasΦ from other species may also be used in accordance with the present disclosure.

Fusion Proteins and Complexes with Internal Insertions

[0199] Provided herein are fusion proteins and complexes comprising a heterologous polypeptide fused to a nucleic acid programmable nucleic acid binding protein, for example, a napDNAbp. A heterologous polypeptide can be a polypeptide that is not found in the native or wild-type napDNAbp polypeptide sequence. The heterologous polypeptide can be fused to the napDNAbp at a C-terminal end of the napDNAbp, an N-terminal end of the napDNAbp, or inserted at an internal location of the napDNAbp In some embodiments, the heterologous polypeptide is a deaminase (e.g., cytidine of adenosine deaminase) or a functional fragment thereof. For example, a fusion protein can comprise a deaminase flanked by an N-terminal fragment and a C-terminal fragment of a Cas9 or Cas12 (e.g., Cas12b/C2c1), polypeptide. In some embodiments, the cytidine deaminase is an APOBEC deaminase (e.g., APOBEC1). In some embodiments, the adenosine deaminase is a TadA (e.g., TadA*7.10 or TadA*8). In some embodiments, the TadA is a TadA*8 or a TadA*9. TadA sequences (e.g., TadA7.10 or TadA*8) as described herein are suitable deaminases for the above-described fusion proteins.

[0200] In some embodiments, the fusion protein comprises the structure:
[0201] NH2-[N-terminal fragment of a napDNAbp]-[deaminase]-[C-terminal fragment of a napDNAbp]-COOH;
[0202] NH2-[N-terminal fragment of a Cas9]-[adenosine deaminase]-[C-terminal fragment of a Cas9]-COOH;
[0203] NH2-[N-terminal fragment of a Cas12]-[adenosine deaminase]-[C-terminal fragment of a Cas12]-COOH;
[0204] NH2-[N-terminal fragment of a Cas9]-[cytidine deaminase]-[C-terminal fragment of a Cas9]-COOH;
[0205] NH2-[N-terminal fragment of a Cas12]-[cytidine deaminase]-[C-terminal fragment of a Cas12]-COOH;
[0206] wherein each instance of “]-[” is an optional linker.

[0207] The deaminase can be a circular permutant deaminase. For example, the deaminase can be a circular permutant adenosine deaminase. In some embodiments, the deaminase is a circular permutant TadA, circularly permutated at amino acid residue 116, 136, or 65 as numbered in the TadA reference sequence.

[0208] The fusion protein or complex can comprise more than one deaminase. The fusion protein or complex can comprise, for example, 1, 2, 3, 4, 5 or more deaminases. In some embodiments, the fusion protein comprises one or two deaminase. The two or more deaminases in a fusion protein can be an adenosine deaminase, a cytidine deaminase, or a combination thereof. The two or more deaminases can be homodimers or heterodimers. The two or more deaminases can be inserted in tandem in the napDNAbp. In some embodiments, the two or more deaminases may not be in tandem in the napDNAbp.

[0209] In some embodiments, the napDNAbp in the fusion protein or complex is a Cas9 polypeptide or a fragment thereof. The Cas9 polypeptide can be a variant Cas9 polypeptide. In some embodiments, the Cas9 polypeptide is a Cas9 nickase (nCas9) polypeptide or a fragment thereof. In some embodiments, the Cas9 polypeptide is a nuclease dead Cas9 (dCas9) polypeptide or a fragment thereof. The Cas9 polypeptide in a fusion protein can be a full-length Cas9 polypeptide. In some cases, the Cas9 polypeptide in a fusion protein may not be a full length Cas9 polypeptide. The Cas9 polypeptide can be truncated, for example, at a N-terminal or C-terminal end relative to a naturally-occurring Cas9 protein. The Cas9 polypeptide can be a circularly permuted Cas9 protein. The Cas9 polypeptide can be a fragment, a portion, or a domain of a Cas9 polypeptide, that is still capable of binding the target polynucleotide and a guide nucleic acid sequence.

[0210] In some embodiments, the Cas9 polypeptide is a Streptococcus pyogenes Cas9 (SpCas9), Staphylococcus aureus Cas9 (SaCas9), Streptococcus thermophilus 1 Cas9 (St1Cas9), or fragments or variants of any of the Cas9 polypeptides described herein.

[0211] In some embodiments, the fusion protein or complex comprises an adenosine deaminase domain and a cytidine deaminase domain inserted within a Cas9. In some embodiments, an adenosine deaminase is fused within a Cas9 and a cytidine deaminase is fused to the C-terminus. In some embodiments, an adenosine deaminase is fused within Cas9 and a cytidine deaminase fused to the N-terminus. In some embodiments, a cytidine deaminase is fused within Cas9 and an adenosine deaminase is fused to the C-terminus. In some embodiments, a cytidine deaminase is fused within Cas9 and an adenosine deaminase fused to the N-terminus.

[0212] Exemplary structures of a fusion protein with an adenosine deaminase and a cytidine deaminase and a Cas9 are provided as follows:
[0213] NH2-[Cas9 (adenosine deaminase)]-[cytidine deaminase]-COOH;
[0214] NH2-[cytidine deaminase]-[Cas9 (adenosine deaminase)]-COOH;
[0215] NH2-[Cas9 (cytidine deaminase)]-[adenosine deaminase]-COOH; or
[0216] NH2-[adenosine deaminase]-[Cas9 (cytidine deaminase)]-COOH.

[0217] In some embodiments, the “-” used in the general architecture above indicates the presence of an optional linker.

[0218] In various embodiments, the catalytic domain has DNA modifying activity (e.g., deaminase activity), such as adenosine deaminase activity. In some embodiments, the adenosine deaminase is a TadA (e.g., TadA*7.10). In some embodiments, the TadA is a TadA*8. In some embodiments, a TadA*8 is fused within Cas9 and a cytidine deaminase is fused to the C-terminus. In some embodiments, a TadA*8 is fused within Cas9 and a cytidine deaminase fused to the N-terminus. In some embodiments, a cytidine deaminase is fused within Cas9 and a TadA*8 is fused to the C-terminus. In some embodiments, a cytidine deaminase is fused within Cas9 and a TadA*8 fused to the N-terminus. Exemplary structures of a fusion protein with a TadA*8 and a cytidine deaminase and a Cas9 are provided as follows:
[0219] NH2-[Cas9 (TadA*8)]-[cytidine deaminase]-COOH;
[0220] NH2-[cytidine deaminase]-[Cas9 (TadA*8)]-COOH;
[0221] NH2-[Cas9 (cytidine deaminase)]-[TadA*8]-COOH; or
[0222] NH2-[TadA*8]-[Cas9 (cytidine deaminase)]-COOH.

[0223] In some embodiments, the “-” used in the general architecture above indicates the presence of an optional linker.

[0224] The heterologous polypeptide (e.g., deaminase) can be inserted in the napDNAbp (e.g., Cas9 or Cas12 (e.g., Cas12b/C2c1)) at a suitable location, for example, such that the napDNAbp retains its ability to bind the target polynucleotide and a guide nucleic acid. A deaminase (e.g. adenosine deaminase, cytidine deaminase, or adenosine deaminase and cytidine deaminase) can be inserted into a napDNAbp without compromising function of the deaminase (e.g., base editing activity) or the napDNAbp (e.g., ability to bind to target nucleic acid and guide nucleic acid). A deaminase (e.g., adenosine deaminase, cytidine deaminase, or adenosine deaminase and cytidine deaminase) can be inserted in the napDNAbp at, for example, a disordered region or a region comprising a high temperature factor or B-factor as shown by crystallographic studies. Regions of a protein that are less ordered, disordered, or unstructured, for example solvent exposed regions and loops, can be used for insertion without compromising structure or function.

[0225] A deaminase (e.g., adenosine deaminase, cytidine deaminase, or adenosine deaminase and cytidine deaminase) can be inserted in the napDNAbp in a flexible loop region or a solvent-exposed region. In some embodiments, the deaminase (e.g., adenosine deaminase, cytidine deaminase, or adenosine deaminase and cytidine deaminase) is inserted in a flexible loop of the Cas9 or the Cas12b/C2c1 polypeptide.

[0226] In some embodiments, the insertion location of a deaminase (e.g., adenosine deaminase, cytidine deaminase, or adenosine deaminase and cytidine deaminase) is determined by B-factor analysis of the crystal structure of Cas9 polypeptide. In some embodiments, the deaminase (e.g. adenosine deaminase, cytidine deaminase, or adenosine deaminase and cytidine deaminase) is inserted in regions of the Cas9 polypeptide comprising higher than average B-factors (e.g., higher B factors compared to the total protein or the protein domain comprising the disordered region). B-factor or temperature factor can indicate the fluctuation of atoms from their average position (for example, as a result of temperature-dependent atomic vibrations or static disorder in a crystal lattice). A high B-factor (e.g., higher than average B-factor) for backbone atoms can be indicative of a region with relatively high local mobility. Such a region can be used for inserting a deaminase without compromising structure or function. A deaminase (e.g., adenosine deaminase, cytidine deaminase, or adenosine deaminase and cytidine deaminase) can be inserted at a location with a residue having a Cu atom with a B-factor that is 50%, 60%, 70%, 80%, 90%, 100%, 110%, 120%, 130%, 140%, 150%, 160%, 170%, 180%, 190%, 200%, or greater than 200% more than the average B-factor for the total protein. A deaminase (e.g., adenosine deaminase, cytidine deaminase, or adenosine deaminase and cytidine deaminase) can be inserted at a location with a residue having a Cu atom with a B-factor that is 50%, 60%, 70%, 80%, 90%, 100%, 110%, 120%, 130%, 140%, 150%, 160%, 170%, 180%, 190%, 200% or greater than 200% more than the average B-factor for a Cas9 protein domain comprising the residue. Cas9 polypeptide positions comprising a higher than average B-factor can include, for example, residues 768, 792, 1052, 1015, 1022, 1026, 1029, 1067, 1040, 1054, 1068, 1246, 1247, and 1248 as numbered in the above Cas9 reference sequence. Cas9 polypeptide regions comprising a higher than average B-factor can include, for example, residues 792-872, 792-906, and 2-791 as numbered in the above Cas9 reference sequence.

[0227] A heterologous polypeptide (e.g., deaminase) can be inserted in the napDNAbp at an amino acid residue selected from the group consisting of: 768, 791, 792, 1015, 1016, 1022, 1023, 1026, 1029, 1040, 1052, 1054, 1067, 1068, 1069, 1246, 1247, and 1248 as numbered in the above Cas9 reference sequence, or a corresponding amino acid residue in another Cas9 polypeptide. In some embodiments, the heterologous polypeptide is inserted between amino acid positions 768-769, 791-792, 792-793, 1015-1016, 1022-1023, 1026-1027, 1029-1030, 1040-1041, 1052-1053, 1054-1055, 1067-1068, 1068-1069, 1247-1248, or 1248-1249 as numbered in the above Cas9 reference sequence or corresponding amino acid positions thereof. In some embodiments, the heterologous polypeptide is inserted between amino acid positions 769-770, 792-793, 793-794, 1016-1017, 1023-1024, 1027-1028, 1030-1031, 1041-1042, 1053-1054, 1055-1056, 1068-1069, 1069-1070, 1248-1249, or 1249-1250 as numbered in the above Cas9 reference sequence or corresponding amino acid positions thereof. In some embodiments, the heterologous polypeptide replaces an amino acid residue selected from the group consisting of: 768, 791, 792, 1015, 1016, 1022, 1023, 1026, 1029, 1040, 1052, 1054, 1067, 1068, 1069, 1246, 1247, and 1248 as numbered in the above Cas9 reference sequence, or a corresponding amino acid residue in another Cas9 polypeptide. It should be understood that the reference to the above Cas9 reference sequence with respect to insertion positions is for illustrative purposes. The insertions as discussed herein are not limited to the Cas9 polypeptide sequence of the above Cas9 reference sequence, but include insertion at corresponding locations in variant Cas9 polypeptides, for example a Cas9 nickase (nCas9), nuclease dead Cas9 (dCas9), a Cas9 variant lacking a nuclease domain, a truncated Cas9, or a Cas9 domain lacking partial or complete HNH domain.

[0228] A heterologous polypeptide (e.g., deaminase) can be inserted in the napDNAbp at an amino acid residue selected from the group consisting of: 768, 792, 1022, 1026, 1040, 1068, and 1247 as numbered in the above Cas9 reference sequence, or a corresponding amino acid residue in another Cas9 polypeptide. In some embodiments, the heterologous polypeptide is inserted between amino acid positions 768-769, 792-793, 1022-1023, 1026-1027, 1029-1030, 1040-1041, 1068-1069, or 1247-1248 as numbered in the above Cas9 reference sequence or corresponding amino acid positions thereof. In some embodiments, the heterologous polypeptide is inserted between amino acid positions 769-770, 793-794, 1023-1024, 1027-1028, 1030-1031, 1041-1042, 1069-1070, or 1248-1249 as numbered in the above Cas9 reference sequence or corresponding amino acid positions thereof. In some embodiments, the heterologous polypeptide replaces an amino acid residue selected from the group consisting of: 768, 792, 1022, 1026, 1040, 1068, and 1247 as numbered in the above Cas9 reference sequence, or a corresponding amino acid residue in another Cas9 polypeptide.

[0229] A heterologous polypeptide (e.g., deaminase) can be inserted in the napDNAbp at an amino acid residue as described herein, or a corresponding amino acid residue in another Cas9 polypeptide. In an embodiment, a heterologous polypeptide (e.g., deaminase) can be inserted in the napDNAbp at an amino acid residue selected from the group consisting of: 1002, 1003, 1025, 1052-1056, 1242-1247, 1061-1077, 943-947, 686-691, 569-578, 530-539, and 1060-1077 as numbered in the above Cas9 reference sequence, or a corresponding amino acid residue in another Cas9 polypeptide. The deaminase (e.g., adenosine deaminase, cytidine deaminase, or adenosine deaminase and cytidine deaminase) can be inserted at the N-terminus or the C-terminus of the residue or replace the residue. In some embodiments, the deaminase (e.g., adenosine deaminase, cytidine deaminase, or adenosine deaminase and cytidine deaminase) is inserted at the C-terminus of the residue.

[0230] In some embodiments, an adenosine deaminase (e.g., TadA) is inserted at an amino acid residue selected from the group consisting of: 1015, 1022, 1029, 1040, 1068, 1247, 1054, 1026, 768, 1067, 1248, 1052, and 1246 as numbered in the above Cas9 reference sequence, or a corresponding amino acid residue in another Cas9 polypeptide. In some embodiments, an adenosine deaminase (e.g., TadA) is inserted in place of residues 792-872, 792-906, or 2-791 as numbered in the above Cas9 reference sequence, or a corresponding amino acid residue in another Cas9 polypeptide. In some embodiments, the adenosine deaminase is inserted at the N-terminus of an amino acid selected from the group consisting of: 1015, 1022, 1029, 1040, 1068, 1247, 1054, 1026, 768, 1067, 1248, 1052, and 1246 as numbered in the above Cas9 reference sequence, or a corresponding amino acid residue in another Cas9 polypeptide. In some embodiments, the adenosine deaminase is inserted at the C-terminus of an amino acid selected from the group consisting of: 1015, 1022, 1029, 1040, 1068, 1247, 1054, 1026, 768, 1067, 1248, 1052, and 1246 as numbered in the above Cas9 reference sequence, or a corresponding amino acid residue in another Cas9 polypeptide. In some embodiments, the adenosine deaminase is inserted to replace an amino acid selected from the group consisting of: 1015, 1022, 1029, 1040, 1068, 1247, 1054, 1026, 768, 1067, 1248, 1052, and 1246 as numbered in the above Cas9 reference sequence, or a corresponding amino acid residue in another Cas9 polypeptide.

[0231] In some embodiments, a cytidine deaminase (e.g., APOBEC1) is inserted at an amino acid residue selected from the group consisting of: 1016, 1023, 1029, 1040, 1069, and 1247 as numbered in the above Cas9 reference sequence, or a corresponding amino acid residue in another Cas9 polypeptide. In some embodiments, the cytidine deaminase is inserted at the N-terminus of an amino acid selected from the group consisting of: 1016, 1023, 1029, 1040, 1069, and 1247 as numbered in the above Cas9 reference sequence, or a corresponding amino acid residue in another Cas9 polypeptide. In some embodiments, the cytidine deaminase is inserted at the C-terminus of an amino acid selected from the group consisting of: 1016, 1023, 1029, 1040, 1069, and 1247 as numbered in the above Cas9 reference sequence, or a corresponding amino acid residue in another Cas9 polypeptide. In some embodiments, the cytidine deaminase is inserted to replace an amino acid selected from the group consisting of: 1016, 1023, 1029, 1040, 1069, and 1247 as numbered in the above Cas9 reference sequence, or a corresponding amino acid residue in another Cas9 polypeptide.

[0232] In some embodiments, the deaminase (e.g., adenosine deaminase, cytidine deaminase, or adenosine deaminase and cytidine deaminase) is inserted at amino acid residue 768 as numbered in the above Cas9 reference sequence, or a corresponding amino acid residue in another Cas9 polypeptide. In some embodiments, the deaminase (e.g., adenosine deaminase, cytidine deaminase, or adenosine deaminase and cytidine deaminase) is inserted at the N-terminus of amino acid residue 768 as numbered in the above Cas9 reference sequence, or a corresponding amino acid residue in another Cas9 polypeptide. In some embodiments, the deaminase (e.g., adenosine deaminase, cytidine deaminase, or adenosine deaminase and cytidine deaminase) is inserted at the C-terminus of amino acid residue 768 as numbered in the above Cas9 reference sequence, or a corresponding amino acid residue in another Cas9 polypeptide. In some embodiments, the deaminase (e.g., adenosine deaminase, cytidine deaminase, or adenosine deaminase and cytidine deaminase) is inserted to replace amino acid residue 768 as numbered in the above Cas9 reference sequence, or a corresponding amino acid residue in another Cas9 polypeptide.

[0233] In some embodiments, the deaminase (e.g., adenosine deaminase, cytidine deaminase, or adenosine deaminase and cytidine deaminase) is inserted at amino acid residue 791 or is inserted at amino acid residue 792, as numbered in the above Cas9 reference sequence, or a corresponding amino acid residue in another Cas9 polypeptide. In some embodiments, the deaminase (e.g., adenosine deaminase, cytidine deaminase, or adenosine deaminase and cytidine deaminase) is inserted at the N-terminus of amino acid residue 791 or is inserted at the N-terminus of amino acid 792, as numbered in the above Cas9 reference sequence, or a corresponding amino acid residue in another Cas9 polypeptide. In some embodiments, the deaminase (e.g., adenosine deaminase, cytidine deaminase, or adenosine deaminase and cytidine deaminase) is inserted at the C-terminus of amino acid 791 or is inserted at the N-terminus of amino acid 792, as numbered in the above Cas9 reference sequence, or a corresponding amino acid residue in another Cas9 polypeptide. In some embodiments, the deaminase (e.g., adenosine deaminase, cytidine deaminase, or adenosine deaminase and cytidine deaminase) is inserted to replace amino acid 791, or is inserted to replace amino acid 792, as numbered in the above Cas9 reference sequence, or a corresponding amino acid residue in another Cas9 polypeptide.

[0234] In some embodiments, the deaminase (e.g., adenosine deaminase, cytidine deaminase, or adenosine deaminase and cytidine deaminase) is inserted at amino acid residue 1016 as numbered in the above Cas9 reference sequence, or a corresponding amino acid residue in another Cas9 polypeptide. In some embodiments, the deaminase (e.g., adenosine deaminase, cytidine deaminase, or adenosine deaminase and cytidine deaminase) is inserted at the N-terminus of amino acid residue 1016 as numbered in the above Cas9 reference sequence, or a corresponding amino acid residue in another Cas9 polypeptide. In some embodiments, the deaminase (e.g., adenosine deaminase, cytidine deaminase, or adenosine deaminase and cytidine deaminase) is inserted at the C-terminus of amino acid residue 1016 as numbered in the above Cas9 reference sequence, or a corresponding amino acid residue in another Cas9 polypeptide. In some embodiments, the deaminase (e.g., adenosine deaminase, cytidine deaminase, or adenosine deaminase and cytidine deaminase) is inserted to replace amino acid residue 1016 as numbered in the above Cas9 reference sequence, or a corresponding amino acid residue in another Cas9 polypeptide.

[0235] In some embodiments, the deaminase (e.g., adenosine deaminase, cytidine deaminase, or adenosine deaminase and cytidine deaminase) is inserted at amino acid residue 1022, or is inserted at amino acid residue 1023, as numbered in the above Cas9 reference sequence, or a corresponding amino acid residue in another Cas9 polypeptide. In some embodiments, the deaminase (e.g., adenosine deaminase, cytidine deaminase, or adenosine deaminase and cytidine deaminase) is inserted at the N-terminus of amino acid residue 1022 or is inserted at the N-terminus of amino acid residue 1023, as numbered in the above Cas9 reference sequence, or a corresponding amino acid residue in another Cas9 polypeptide. In some embodiments, the deaminase (e.g., adenosine deaminase, cytidine deaminase, or adenosine deaminase and cytidine deaminase) is inserted at the C-terminus of amino acid residue 1022 or is inserted at the C-terminus of amino acid residue 1023, as numbered in the above Cas9 reference sequence, or a corresponding amino acid residue in another Cas9 polypeptide. In some embodiments, the deaminase (e.g., adenosine deaminase, cytidine deaminase, or adenosine deaminase and cytidine deaminase) is inserted to replace amino acid residue 1022, or is inserted to replace amino acid residue 1023, as numbered in the above Cas9 reference sequence, or a corresponding amino acid residue in another Cas9 polypeptide.

[0236] In some embodiments, the deaminase (e.g., adenosine deaminase, cytidine deaminase, or adenosine deaminase and cytidine deaminase) is inserted at amino acid residue 1026, or is inserted at amino acid residue 1029, as numbered in the above Cas9 reference sequence, or a corresponding amino acid residue in another Cas9 polypeptide. In some embodiments, the deaminase (e.g., adenosine deaminase, cytidine deaminase, or adenosine deaminase and cytidine deaminase) is inserted at the N-terminus of amino acid residue 1026 or is inserted at the N-terminus of amino acid residue 1029, as numbered in the above Cas9 reference sequence, or a corresponding amino acid residue in another Cas9 polypeptide. In some embodiments, the deaminase (e.g., adenosine deaminase, cytidine deaminase, or adenosine deaminase and cytidine deaminase) is inserted at the C-terminus of amino acid residue 1026 or is inserted at the C-terminus of amino acid residue 1029, as numbered in the above Cas9 reference sequence, or a corresponding amino acid residue in another Cas9 polypeptide. In some embodiments, the deaminase (e.g., adenosine deaminase, cytidine deaminase, or adenosine deaminase and cytidine deaminase) is inserted to replace amino acid residue 1026, or is inserted to replace amino acid residue 1029, as numbered in the above Cas9 reference sequence, or corresponding amino acid residue in another Cas9 polypeptide.

[0237] In some embodiments, the deaminase (e.g., adenosine deaminase, cytidine deaminase, or adenosine deaminase and cytidine deaminase) is inserted at amino acid residue 1040 as numbered in the above Cas9 reference sequence, or a corresponding amino acid residue in another Cas9 polypeptide. In some embodiments, the deaminase (e.g., adenosine deaminase, cytidine deaminase, or adenosine deaminase and cytidine deaminase) is inserted at the N-terminus of amino acid residue 1040 as numbered in the above Cas9 reference sequence, or a corresponding amino acid residue in another Cas9 polypeptide. In some embodiments, the deaminase (e.g., adenosine deaminase, cytidine deaminase, or adenosine deaminase and cytidine deaminase) is inserted at the C-terminus of amino acid residue 1040 as numbered in the above Cas9 reference sequence, or a corresponding amino acid residue in another Cas9 polypeptide. In some embodiments, the deaminase (e.g., adenosine deaminase, cytidine deaminase, or adenosine deaminase and cytidine deaminase) is inserted to replace amino acid residue 1040 as numbered in the above Cas9 reference sequence, or a corresponding amino acid residue in another Cas9 polypeptide.

[0238] In some embodiments, the deaminase (e.g., adenosine deaminase, cytidine deaminase, or adenosine deaminase and cytidine deaminase) is inserted at amino acid residue 1052, or is inserted at amino acid residue 1054, as numbered in the above Cas9 reference sequence, or a corresponding amino acid residue in another Cas9 polypeptide. In some embodiments, the deaminase (e.g., adenosine deaminase, cytidine deaminase, or adenosine deaminase and cytidine deaminase) is inserted at the N-terminus of amino acid residue 1052 or is inserted at the N-terminus of amino acid residue 1054, as numbered in the above Cas9 reference sequence, or a corresponding amino acid residue in another Cas9 polypeptide. In some embodiments, the deaminase (e.g., adenosine deaminase, cytidine deaminase, or adenosine deaminase and cytidine deaminase) is inserted at the C-terminus of amino acid residue 1052 or is inserted at the C-terminus of amino acid residue 1054, as numbered in the above Cas9 reference sequence, or a corresponding amino acid residue in another Cas9 polypeptide. In some embodiments, the deaminase (e.g., adenosine deaminase, cytidine deaminase, or adenosine deaminase and cytidine deaminase) is inserted to replace amino acid residue 1052, or is inserted to replace amino acid residue 1054, as numbered in the above Cas9 reference sequence, or a corresponding amino acid residue in another Cas9 polypeptide.

[0239] In some embodiments, the deaminase (e.g., adenosine deaminase, cytidine deaminase, or adenosine deaminase and cytidine deaminase) is inserted at amino acid residue 1067, or is inserted at amino acid residue 1068, or is inserted at amino acid residue 1069, as numbered in the above Cas9 reference sequence, or a corresponding amino acid residue in another Cas9 polypeptide. In some embodiments, the deaminase (e.g., adenosine deaminase, cytidine deaminase, or adenosine deaminase and cytidine deaminase) is inserted at the N-terminus of amino acid residue 1067 or is inserted at the N-terminus of amino acid residue 1068 or is inserted at the N-terminus of amino acid residue 1069, as numbered in the above Cas9 reference sequence, or a corresponding amino acid residue in another Cas9 polypeptide. In some embodiments, the deaminase (e.g., adenosine deaminase, cytidine deaminase, or adenosine deaminase and cytidine deaminase) is inserted at the C-terminus of amino acid residue 1067 or is inserted at the C-terminus of amino acid residue 1068 or is inserted at the C-terminus of amino acid residue 1069, as numbered in the above Cas9 reference sequence, or a corresponding amino acid residue in another Cas9 polypeptide. In some embodiments, the deaminase (e.g., adenosine deaminase, cytidine deaminase, or adenosine deaminase and cytidine deaminase) is inserted to replace amino acid residue 1067, or is inserted to replace amino acid residue 1068, or is inserted to replace amino acid residue 1069, as numbered in the above Cas9 reference sequence, or a corresponding amino acid residue in another Cas9 polypeptide.

[0240] In some embodiments, the deaminase (e.g., adenosine deaminase, cytidine deaminase, or adenosine deaminase and cytidine deaminase) is inserted at amino acid residue 1246, or is inserted at amino acid residue 1247, or is inserted at amino acid residue 1248, as numbered in the above Cas9 reference sequence, or a corresponding amino acid residue in another Cas9 polypeptide. In some embodiments, the deaminase (e.g., adenosine deaminase, cytidine deaminase, or adenosine deaminase and cytidine deaminase) is inserted at the N-terminus of amino acid residue 1246 or is inserted at the N-terminus of amino acid residue 1247 or is inserted at the N-terminus of amino acid residue 1248, as numbered in the above Cas9 reference sequence, or a corresponding amino acid residue in another Cas9 polypeptide. In some embodiments, the deaminase (e.g., adenosine deaminase, cytidine deaminase, or adenosine deaminase and cytidine deaminase) is inserted at the C-terminus of amino acid residue 1246 or is inserted at the C-terminus of amino acid residue 1247 or is inserted at the C-terminus of amino acid residue 1248, as numbered in the above Cas9 reference sequence, or a corresponding amino acid residue in another Cas9 polypeptide. In some embodiments, the deaminase (e.g., adenosine deaminase, cytidine deaminase, or adenosine deaminase and cytidine deaminase) is inserted to replace amino acid residue 1246, or is inserted to replace amino acid residue 1247, or is inserted to replace amino acid residue 1248, as numbered in the above Cas9 reference sequence, or a corresponding amino acid residue in another Cas9 polypeptide.

[0241] In some embodiments, a heterologous polypeptide (e.g., deaminase) is inserted in a flexible loop of a Cas9 polypeptide. The flexible loop portions can be selected from the group consisting of 530-537, 569-570, 686-691, 943-947, 1002-1025, 1052-1077, 1232-1247, or 1298-1300 as numbered in the above Cas9 reference sequence, or a corresponding amino acid residue in another Cas9 polypeptide. The flexible loop portions can be selected from the group consisting of: 1-529, 538-568, 580-685, 692-942, 948-1001, 1026-1051, 1078-1231, or 1248-1297 as numbered in the above Cas9 reference sequence, or a corresponding amino acid residue in another Cas9 polypeptide.

[0242] A heterologous polypeptide (e.g., adenine deaminase) can be inserted into a Cas9 polypeptide region corresponding to amino acid residues: 1017-1069, 1242-1247, 1052-1056, 1060-1077, 1002-1003, 943-947, 530-537, 568-579, 686-691, 1242-1247, 1298-1300, 1066-1077, 1052-1056, or 1060-1077 as numbered in the above Cas9 reference sequence, or a corresponding amino acid residue in another Cas9 polypeptide.

[0243] A heterologous polypeptide (e.g., adenine deaminase) can be inserted in place of a deleted region of a Cas9 polypeptide. The deleted region can correspond to an N-terminal or C-terminal portion of the Cas9 polypeptide. In some embodiments, the deleted region corresponds to residues 792-872 as numbered in the above Cas9 reference sequence, or a corresponding amino acid residue in another Cas9 polypeptide. In some embodiments, the deleted region corresponds to residues 792-906 as numbered in the above Cas9 reference sequence, or a corresponding amino acid residue in another Cas9 polypeptide. In some embodiments, the deleted region corresponds to residues 2-791 as numbered in the above Cas9 reference sequence, or a corresponding amino acid residue in another Cas9 polypeptide. In some embodiments, the deleted region corresponds to residues 1017-1069 as numbered in the above Cas9 reference sequence, or corresponding amino acid residues thereof.

[0244] Exemplary internal fusions base editors are provided in Table 4 below. Inlaid base editors (IBEs) are described in S. Haihua Chu, et al. The CRISPR Journal. April 2021.169-177, the disclosure of which is incorporated herein by reference in its entirety for all purposes.

TABLE 4
Insertion loci in Cas9 proteins

| BE ID | Modification | Other ID |
|---|---|---|
| IBE1 | Cas9 TadA ins 1015 | ISLAY001 |
| IBE2 | Cas9 TadA ins 1022 | ISLAY002 |
| IBE3 | Cas9 TadA ins 1029 | ISLAY003 |
| IBE4 | Cas9 TadA ins 1040 | ISLAY004 |
| IBE5 | Cas9 TadA ins 1068 | ISLAY005 |
| IBE6 | Cas9 TadA ins 1247 | ISLAY006 |
| IBE7 | Cas9 TadA ins 1054 | ISLAY007 |
| IBE8 | Cas9 TadA ins 1026 | ISLAY008 |
| IBE9 | Cas9 TadA ins 768 | ISLAY009 |
| IBE20 | delta HNH TadA 792 | ISLAY020 |
| IBE21 | N-term fusion single TadA | ISLAY021 |
| | helix truncated 165-end | |
| IBE29 | TadA-Circular Permutant116 ins1067 | ISLAY029 |
| IBE31 | TadA-Circular Permutant 136 ins1248 | ISLAY031 |
| IBE32 | TadA-Circular Permutant 136ins 1052 | ISLAY032 |
| IBE35 | delta 792-872 TadA ins | ISLAY035 |
| IBE36 | delta 792-906 TadA ins | ISLAY036 |
| IBE43 | TadA-Circular Permutant 65 ins1246 | ISLAY043 |
| IBE44 | TadA ins C-term truncate2 791 | ISLAY044 |

[0245] A heterologous polypeptide (e.g., deaminase) can be inserted within a structural or functional domain of a Cas9 polypeptide. A heterologous polypeptide (e.g., deaminase) can be inserted between two structural or functional domains of a Cas9 polypeptide. A heterologous polypeptide (e.g., deaminase) can be inserted in place of a structural or functional domain of a Cas9 polypeptide, for example, after deleting the domain from the Cas9 polypeptide. The structural or functional domains of a Cas9 polypeptide can include, for example, RuvC I, RuvC II, RuvC III, Rec1, Rec2, PI, or HNH.

[0246] In some embodiments, the Cas9 polypeptide lacks one or more domains selected from the group consisting of RuvC I, RuvC II, RuvC III, Rec1, Rec2, PI, or HNH domain. In some embodiments, the Cas9 polypeptide lacks a nuclease domain. In some embodiments, the Cas9 polypeptide lacks an HNH domain. In some embodiments, the Cas9 polypeptide lacks a portion of the HNH domain such that the Cas9 polypeptide has reduced or abolished HNH activity. In some embodiments, the Cas9 polypeptide comprises a deletion of the nuclease domain, and the deaminase is inserted to replace the nuclease domain. In some embodiments, the HNH domain is deleted and the deaminase is inserted in its place. In some embodiments, one or more of the RuvC domains is deleted and the deaminase is inserted in its place.

[0247] A fusion protein comprising a heterologous polypeptide can be flanked by a N-terminal and a C-terminal fragment of a napDNAbp. In some embodiments, the fusion protein comprises a deaminase flanked by a N-terminal fragment and a C-terminal fragment of a Cas9 polypeptide. The N terminal fragment or the C terminal fragment can bind the target polynucleotide sequence. The C-terminus of the N terminal fragment or the N-terminus of the C terminal fragment can comprise a part of a flexible loop of a Cas9 polypeptide. The C-terminus of the N terminal fragment or the N-terminus of the C terminal fragment can comprise a part of an alpha-helix structure of the Cas9 polypeptide. The N-terminal fragment or the C-terminal fragment can comprise a DNA binding domain. The N-terminal fragment or the C-terminal fragment can comprise a RuvC domain. The N-terminal fragment or the C-terminal fragment can comprise an HNH domain. In some embodiments, neither of the N-terminal fragment and the C-terminal fragment comprises an HNH domain.

[0248] In some embodiments, the C-terminus of the N terminal Cas9 fragment comprises an amino acid that is in proximity to a target nucleobase when the fusion protein deaminates the target nucleobase. In some embodiments, the N-terminus of the C terminal Cas9 fragment comprises an amino acid that is in proximity to a target nucleobase when the fusion protein deaminates the target nucleobase. The insertion location of different deaminases can be different in order to have proximity between the target nucleobase and an amino acid in the C-terminus of the N terminal Cas9 fragment or the N-terminus of the C terminal Cas9 fragment. For example, the insertion position of an deaminase can be at an amino acid residue selected from the group consisting of 1015, 1022, 1029, 1040, 1068, 1247, 1054, 1026, 768, 1067, 1248, 1052, and 1246 as numbered in the above Cas9 reference sequence, or a corresponding amino acid residue in another Cas9 polypeptide.

[0249] The N-terminal Cas9 fragment of a fusion protein (i.e. the N-terminal Cas9 fragment flanking the deaminase in a fusion protein) or complex can comprise the N-terminus of a Cas9 polypeptide. The N-terminal Cas9 fragment of a fusion protein can comprise a length of at least about: 100, 200, 300, 400, 500, 600, 700, 800, 900, 1000, 1100, 1200, or 1300 amino acids. The N-terminal Cas9 fragment of a fusion protein can comprise a sequence corresponding to amino acid residues: 1-56, 1-95, 1-200, 1-300, 1-400, 1-500, 1-600, 1-700, 1-718, 1-765, 1-780, 1-906, 1-918, or 1-1100 as numbered in the above Cas9 reference sequence, or a corresponding amino acid residue in another Cas9 polypeptide. The N-terminal Cas9 fragment can comprise a sequence comprising at least: 85%, at least 90%, at least 91%, at least 92%, at least 93%, at least 94%, at least 95%, at least 96%, at least 97%, at least 98%, at least 99%, or at least 99.5% sequence identity to amino acid residues: 1-56, 1-95, 1-200, 1-300, 1-400, 1-500, 1-600, 1-700, 1-718, 1-765, 1-780, 1-906, 1-918, or 1-1100 as numbered in the above Cas9 reference sequence, or a corresponding amino acid residue in another Cas9 polypeptide.

[0250] The C-terminal Cas9 fragment of a fusion protein (i.e. the C-terminal Cas9 fragment flanking the deaminase in a fusion protein) or complex can comprise the C-terminus of a Cas9 polypeptide. The C-terminal Cas9 fragment of a fusion protein or complex comprises a length of at least about: 100, 200, 300, 400, 500, 600, 700, 800, 900, 1000, 1100, 1200, or 1300 amino acids. The C-terminal Cas9 fragment of a fusion protein or complex comprises a sequence corresponding to amino acid residues: 1099-1368, 918-1368, 906-1368, 780-1368, 765-1368, 718-1368, 94-1368, or 56-1368 as numbered in the above Cas9 reference sequence, or a corresponding amino acid residue in another Cas9 polypeptide. The N-terminal Cas9 fragment comprises a sequence comprising at least: 85%, at least 90%, at least 91%, at least 92%, at least 93%, at least 94%, at least 95%, at least 96%, at least 97%, at least 98%, at least 99%, or at least 99.5% sequence identity to amino acid residues: 1099-1368, 918-1368, 906-1368, 780-1368, 765-1368, 718-1368, 94-1368, or 56-1368 as numbered in the above Cas9 reference sequence, or a corresponding amino acid residue in another Cas9 polypeptide.

[0251] The N-terminal Cas9 fragment and C-terminal Cas9 fragment of a fusion protein taken together may not correspond to a full-length naturally occurring Cas9 polypeptide sequence, for example, as set forth in the above Cas9 reference sequence.

[0252] The fusion protein or complex described herein can effect targeted deamination with reduced deamination at non-target sites (e.g., off-target sites), such as reduced genome wide spurious deamination. The fusion protein described herein can effect targeted deamination with reduced bystander deamination at non-target sites. The undesired deamination or off-target deamination can be reduced by at least 30%, at least 40%, at least 50%, at least 60%, at least 70%, at least 80%, at least 90%, at least 95%, or at least 99% compared with, for example, an end terminus fusion protein comprising the deaminase fused to a N terminus or a C terminus of a Cas9 polypeptide. The undesired deamination or off-target deamination can be reduced by at least one-fold, at least two-fold, at least three-fold, at least four-fold, at least five-fold, at least tenfold, at least fifteen fold, at least twenty fold, at least thirty fold, at least forty fold, at least fifty fold, at least 60 fold, at least 70 fold, at least 80 fold, at least 90 fold, or at least hundred fold, compared with, for example, an end terminus fusion protein comprising the deaminase fused to a N terminus or a C terminus of a Cas9 polypeptide.

[0253] In some embodiments, the deaminase (e.g., adenosine deaminase, cytidine deaminase, or adenosine deaminase and cytidine deaminase) of the fusion protein or complex deaminates no more than two nucleobases within the range of an R-loop. In some embodiments, the deaminase of the fusion protein deaminates no more than three nucleobases within the range of the R-loop. In some embodiments, the deaminase of the fusion protein deaminates no more than 2, 3, 4, 5, 6, 7, 8, 9, or 10 nucleobases within the range of the R-loop. An R-loop is a three-stranded nucleic acid structure including a DNA:RNA hybrid, a DNA:DNA or an RNA: RNA complementary structure and the associated with single-stranded DNA. As used herein, an R-loop may be formed when a target polynucleotide is contacted with a CRISPR complex or a base editing complex, wherein a portion of a guide polynucleotide, e.g. a guide RNA, hybridizes with and displaces with a portion of a target polynucleotide, e.g. a target DNA. In some embodiments, an R-loop comprises a hybridized region of a spacer sequence and a target DNA complementary sequence. An R-loop region may be of about 5, 6, 7, 8, 9, 10, 11, 12, 13, 14, 15, 16, 17, 18, 19, 20, 21, 22, 23, 24, 25, 26, 27, 28, 29, 30, 31, 32, 33, 34, 35, 36, 37, 38, 39, 40, 41, 42, 43, 44, 45, 46, 47, 48, 49, or 50 nucleobase pairs in length. In some embodiments, the R-loop region is about 20 nucleobase pairs in length. It should be understood that, as used herein, an R-loop region is not limited to the target DNA strand that hybridizes with the guide polynucleotide. For example, editing of a target nucleobase within an R-loop region may be to a DNA strand that comprises the complementary strand to a guide RNA, or may be to a DNA strand that is the opposing strand of the strand complementary to the guide RNA. In some embodiments, editing in the region of the R-loop comprises editing a nucleobase on non-complementary strand (protospacer strand) to a guide RNA in a target DNA sequence.

[0254] The fusion protein or complex described herein can effect target deamination in an editing window different from canonical base editing. In some embodiments, a target nucleobase is from about 1 to about 20 bases upstream of a PAM sequence in the target polynucleotide sequence. In some embodiments, a target nucleobase is from about 2 to about 12 bases upstream of a PAM sequence in the target polynucleotide sequence. In some embodiments, a target nucleobase is from about 1 to 9 base pairs, about 2 to 10 base pairs, about 3 to 11 base pairs, about 4 to 12 base pairs, about 5 to 13 base pairs, about 6 to 14 base pairs, about 7 to 15 base pairs, about 8 to 16 base pairs, about 9 to 17 base pairs, about 10 to 18 base pairs, about 11 to 19 base pairs, about 12 to 20 base pairs, about 1 to 7 base pairs, about 2 to 8 base pairs, about 3 to 9 base pairs, about 4 to 10 base pairs, about 5 to 11 base pairs, about 6 to 12 base pairs, about 7 to 13 base pairs, about 8 to 14 base pairs, about 9 to 15 base pairs, about 10 to 16 base pairs, about 11 to 17 base pairs, about 12 to 18 base pairs, about 13 to 19 base pairs, about 14 to 20 base pairs, about 1 to 5 base pairs, about 2 to 6 base pairs, about 3 to 7 base pairs, about 4 to 8 base pairs, about 5 to 9 base pairs, about 6 to 10 base pairs, about 7 to 11 base pairs, about 8 to 12 base pairs, about 9 to 13 base pairs, about 10 to 14 base pairs, about 11 to 15 base pairs, about 12 to 16 base pairs, about 13 to 17 base pairs, about 14 to 18 base pairs, about 15 to 19 base pairs, about 16 to 20 base pairs, about 1 to 3 base pairs, about 2 to 4 base pairs, about 3 to 5 base pairs, about 4 to 6 base pairs, about 5 to 7 base pairs, about 6 to 8 base pairs, about 7 to 9 base pairs, about 8 to 10 base pairs, about 9 to 11 base pairs, about 10 to 12 base pairs, about 11 to 13 base pairs, about 12 to 14 base pairs, about 13 to 15 base pairs, about 14 to 16 base pairs, about 15 to 17 base pairs, about 16 to 18 base pairs, about 17 to 19 base pairs, about 18 to 20 base pairs away or upstream of the PAM sequence. In some embodiments, a target nucleobase is about 1, 2, 3, 4, 5, 6, 7, 8, 9, 10, 11, 12, 13, 14, 15, 16, 17, 18, 19, 20, or more base pairs away from or upstream of the PAM sequence. In some embodiments, a target nucleobase is about 1, 2, 3, 4, 5, 6, 7, 8, or 9 base pairs upstream of the PAM sequence. In some embodiments, a target nucleobase is about 2, 3, 4, or 6 base pairs upstream of the PAM sequence.

[0255] The fusion protein or complex can comprise more than one heterologous polypeptide. For example, the fusion protein can additionally comprise one or more UGI domains and/or one or more nuclear localization signals. The two or more heterologous domains can be inserted in tandem. The two or more heterologous domains can be inserted at locations such that they are not in tandem in the NapDNAbp.

[0256] A fusion protein or complex can comprise a linker between the deaminase and the napDNAbp polypeptide. The linker can be a peptide or a non-peptide linker. For example, the linker can be an XTEN, (GGGS)n (SEQ ID NO: 246), (GGGGS)n (SEQ ID NO: 247), (G)n, (EAAAK)n (SEQ ID NO: 248), (GGS)n, SGSETPGTSESATPES (SEQ ID NO: 249). In some embodiments, the fusion protein comprises a linker between the N-terminal Cas9 fragment and the deaminase. In some embodiments, the fusion protein comprises a linker between the C-terminal Cas9 fragment and the deaminase. In some embodiments, the N-terminal and C-terminal fragments of napDNAbp are connected to the deaminase with a linker. In some embodiments, the N-terminal and C-terminal fragments are joined to the deaminase domain without a linker. In some embodiments, the fusion protein comprises a linker between the N-terminal Cas9 fragment and the deaminase, but does not comprise a linker between the C-terminal Cas9 fragment and the deaminase. In some embodiments, the fusion protein comprises a linker between the C-terminal Cas9 fragment and the deaminase, but does not comprise a linker between the N-terminal Cas9 fragment and the deaminase.

[0257] In some embodiments, the napDNAbp in the fusion protein is a Cas12 polypeptide, e.g., Cas12b/C2c1, or a fragment thereof. The Cas12 polypeptide can be a variant Cas12 polypeptide. In other embodiments, the N- or C-terminal fragments of the Cas12 polypeptide comprise a nucleic acid programmable DNA binding domain or a RuvC domain. In other embodiments, the fusion protein contains a linker between the Cas12 polypeptide and the catalytic domain. In other embodiments, the amino acid sequence of the linker is GGSGGS (SEQ ID NO: 250) or GSSGSETPGTSESATPESSG (SEQ ID NO: 251). In other embodiments, the linker is a rigid linker. In other embodiments of the above aspects, the linker is encoded by

(SEQ ID NO: 252)
GGAGGCTCTGGAGGAAGC
or
(SEQ ID NO: 253)
GGCTCTTCTGGATCTGAAACACCTGGCACAAGCGAGAGCGCCACCCCTG
AGAGCTCTGGC.

[0258] Fusion proteins comprising a heterologous catalytic domain flanked by N- and C-terminal fragments of a Cas12 polypeptide are also useful for base editing in the methods as described herein. Fusion proteins comprising Cas12 and one or more deaminase domains, e.g., adenosine deaminase, or comprising an adenosine deaminase domain flanked by Cas12 sequences are also useful for highly specific and efficient base editing of target sequences. In an embodiment, a chimeric Cas12 fusion protein contains a heterologous catalytic domain (e.g., adenosine deaminase, cytidine deaminase, or adenosine deaminase and cytidine deaminase) inserted within a Cas12 polypeptide. In some embodiments, the fusion protein comprises an adenosine deaminase domain and a cytidine deaminase domain inserted within a Cas12. In some embodiments, an adenosine deaminase is fused within Cas12 and a cytidine deaminase is fused to the C-terminus. In some embodiments, an adenosine deaminase is fused within Cas12 and a cytidine deaminase fused to the N-terminus. In some embodiments, a cytidine deaminase is fused within Cas12 and an adenosine deaminase is fused to the C-terminus. In some embodiments, a cytidine deaminase is fused within Cas12 and an adenosine deaminase fused to the N-terminus. Exemplary structures of a fusion protein with an adenosine deaminase and a cytidine deaminase and a Cas12 are provided as follows:
[0259] NH2-[Cas12 (adenosine deaminase)]-[cytidine deaminase]-COOH;
[0260] NH2-[cytidine deaminase]-[Cas12 (adenosine deaminase)]-COOH;
[0261] NH2-[Cas12 (cytidine deaminase)]-[adenosine deaminase]-COOH; or
[0262] NH2-[adenosine deaminase]-[Cas12 (cytidine deaminase)]-COOH;

[0263] In some embodiments, the “-” used in the general architecture above indicates the presence of an optional linker.

[0264] In various embodiments, the catalytic domain has DNA modifying activity (e.g., deaminase activity), such as adenosine deaminase activity. In some embodiments, the adenosine deaminase is a TadA (e.g., TadA*7.10). In some embodiments, the TadA is a TadA*8. In some embodiments, a TadA*8 is fused within Cas12 and a cytidine deaminase is fused to the C-terminus. In some embodiments, a TadA*8 is fused within Cas12 and a cytidine deaminase fused to the N-terminus. In some embodiments, a cytidine deaminase is fused within Cas12 and a TadA*8 is fused to the C-terminus. In some embodiments, a cytidine deaminase is fused within Cas12 and a TadA*8 fused to the N-terminus. Exemplary structures of a fusion protein with a TadA*8 and a cytidine deaminase and a Cas12 are provided as follows:
[0265] N-[Cas12 (TadA*8)]-[cytidine deaminase]-C;
[0266] N-[cytidine deaminase]-[Cas12 (TadA*8)]-C;
[0267] N-[Cas12 (cytidine deaminase)]-[TadA*8]-C; or
[0268] N-[TadA*8]-[Cas12 (cytidine deaminase)]-C.

[0269] In some embodiments, the “-” used in the general architecture above indicates the presence of an optional linker.

[0270] In other embodiments, the fusion protein or complex contains one or more catalytic domains. In other embodiments, at least one of the one or more catalytic domains is inserted within the Cas12 polypeptide or is fused at the Cas12 N-terminus or C-terminus. In other embodiments, at least one of the one or more catalytic domains is inserted within a loop, an alpha helix region, an unstructured portion, or a solvent accessible portion of the Cas12 polypeptide. In other embodiments, the Cas12 polypeptide is Cas12a, Cas12b, Cas12c, Cas12d, Cas12e, Cas12g, Cas12h, Cas12i, or Cas12j/CasΦ. In other embodiments, the Cas12 polypeptide has at least about 85% amino acid sequence identity to Bacillus hisashii Cas12b, Bacillus thermoamylovorans Cas12b, Bacillus sp. V3-13 Cas12b, or Alicyclobacillus acidiphilus Cas12b (SEQ ID NO: 254). In other embodiments, the Cas12 polypeptide has at least about 90% amino acid sequence identity to Bacillus hisashii Cas12b (SEQ ID NO: 255), Bacillus thermoamylovorans Cas12b, Bacillus sp. V3-13 Cas12b, or Alicyclobacillus acidiphilus Cas12b. In other embodiments, the Cas12 polypeptide has at least about 95% amino acid sequence identity to Bacillus hisashii Cas12b, Bacillus thermoamylovorans Cas12b (SEQ ID NO: 256), Bacillus sp. V3-13 Cas12b (SEQ ID NO: 257), or Alicyclobacillus acidiphilus Cas12b. In other embodiments, the Cas12 polypeptide contains or consists essentially of a fragment of Bacillus hisashii Cas12b, Bacillus thermoamylovorans Cas12b, Bacillus sp. V3-13 Cas12b, or Alicyclobacillus acidiphilus Cas12b. In embodiments, the Cas12 polypeptide contains BvCas12b (V4), which in some embodiments is expressed as 5′ mRNA Cap-5′ UTR-bhCas12b-STOP sequence-3′ UTR-120polyA tail (SEQ ID NOs: 258-260).

[0271] In other embodiments, the catalytic domain is inserted between amino acid positions 153-154, 255-256, 306-307, 980-981, 1019-1020, 534-535, 604-605, or 344-345 of BhCas12b or a corresponding amino acid residue of Cas12a, Cas12c, Cas12d, Cas12e, Cas12g, Cas12h, Cas12i, or Cas12j/CasΦ. In other embodiments, the catalytic domain is inserted between amino acids P153 and S154 of BhCas12b. In other embodiments, the catalytic domain is inserted between amino acids K255 and E256 of BhCas12b. In other embodiments, the catalytic domain is inserted between amino acids D980 and G981 of BhCas12b. In other embodiments, the catalytic domain is inserted between amino acids K1019 and L1020 of BhCas12b. In other embodiments, the catalytic domain is inserted between amino acids F534 and P535 of BhCas12b. In other embodiments, the catalytic domain is inserted between amino acids K604 and G605 of BhCas12b. In other embodiments, the catalytic domain is inserted between amino acids H344 and F345 of BhCas12b. In other embodiments, catalytic domain is inserted between amino acid positions 147 and 148, 248 and 249, 299 and 300, 991 and 992, or 1031 and 1032 of BvCas12b or a corresponding amino acid residue of Cas12a, Cas12c, Cas12d, Cas12e, Cas12g, Cas12h, Cas12i, or Cas12j/CasΦ. In other embodiments, the catalytic domain is inserted between amino acids P147 and D148 of BvCas12b. In other embodiments, the catalytic domain is inserted between amino acids G248 and G249 of BvCas12b. In other embodiments, the catalytic domain is inserted between amino acids P299 and E300 of BvCas12b. In other embodiments, the catalytic domain is inserted between amino acids G991 and E992 of BvCas12b. In other embodiments, the catalytic domain is inserted between amino acids K1031 and M1032 of BvCas12b. In other embodiments, the catalytic domain is inserted between amino acid positions 157 and 158, 258 and 259, 310 and 311, 1008 and 1009, or 1044 and 1045 of AaCas12b or a corresponding amino acid residue of Cas12a, Cas12c, Cas12d, Cas12e, Cas12g, Cas12h, Cas12i, or Cas12j/CasΦ. In other embodiments, the catalytic domain is inserted between amino acids P157 and G158 of AaCas12b. In other embodiments, the catalytic domain is inserted between amino acids V258 and G259 of AaCas12b. In other embodiments, the catalytic domain is inserted between amino acids D310 and P311 of AaCas12b. In other embodiments, the catalytic domain is inserted between amino acids G1008 and E1009 of AaCas12b. In other embodiments, the catalytic domain is inserted between amino acids G1044 and K1045 at of AaCas12b.

[0272] In other embodiments, the fusion protein contains a nuclear localization signal (e.g., a bipartite nuclear localization signal). In other embodiments, the amino acid sequence of the nuclear localization signal is MAPKKKRKVGIHGVPAA (SEQ ID NO: 261). In other embodiments of the above aspects, the nuclear localization signal is encoded by the following sequence: ATGGCCCCAAAGAAGAAGCGGAAGGTCGGTATCCACGGAGTCCCAGCAGCC (SEQ ID NO: 262). In other embodiments, the Cas12b polypeptide contains a mutation that silences the catalytic activity of a RuvC domain. In other embodiments, the Cas12b polypeptide contains D574A, D829A and/or D952A mutations. In other embodiments, the fusion protein further contains a tag (e.g., an influenza hemagglutinin tag).

[0273] In some embodiments, the fusion protein comprises a napDNAbp domain (e.g., Cas12-derived domain) with an internally fused nucleobase editing domain (e.g., all or a portion of a deaminase domain, e.g., an adenosine deaminase domain). In some embodiments, the napDNAbp is a Cas12b. In some embodiments, the base editor comprises a BhCas12b domain with an internally fused TadA*8 domain inserted at the loci provided in Table 5 below.

TABLE 5
Insertion loci in Cas12b proteins

| BhCas12b | Insertion site | Inserted between aa |
|---|---|---|
| position 1 | 153 | PS |
| position 2 | 255 | KE |
| position 3 | 306 | DE |
| position 4 | 980 | DG |
| position 5 | 1019 | KL |
| position 6 | 534 | FP |
| position 7 | 604 | KG |
| position 8 | 344 | HF |
| BvCas12b | Insertion site | Inserted between aa |
| position 1 | 147 | PD |
| position 2 | 248 | GG |
| position 3 | 299 | PE |
| position 4 | 991 | GE |
| position 5 | 1031 | KM |
| AaCas12b | Insertion site | Inserted between aa |
| position 1 | 157 | PG |
| position 2 | 258 | VG |
| position 3 | 310 | DP |
| position 4 | 1008 | GE |
| position 5 | 1044 | GK |

[0274] By way of nonlimiting example, an adenosine deaminase (e.g., TadA*8.13) may be inserted into a BhCas12b to produce a fusion protein (e.g., TadA*8.13-BhCas12b) that effectively edits a nucleic acid sequence.

[0275] In some embodiments, the base editing system described herein is an ABE with TadA inserted into a Cas9. Polypeptide sequences of relevant ABEs with TadA inserted into a Cas9 are provided in the attached Sequence Listing as SEQ ID NOs: 263-308.

[0276] In some embodiments, adenosine base editors were generated to insert TadA or variants thereof into the Cas9 polypeptide at the identified positions.

[0277] Exemplary, yet nonlimiting, fusion proteins are described in International PCT Application Nos. PCT/US2020/016285 and U.S. Provisional Application Nos. 62/852,228 and 62/852,224, the contents of which are incorporated by reference herein in their entireties.

### A to G Editing

[0278] In some embodiments, a base editor described herein comprises an adenosine deaminase domain. Such an adenosine deaminase domain of a base editor can facilitate the editing of an adenine (A) nucleobase to a guanine (G) nucleobase by deaminating the A to form inosine (I), which exhibits base pairing properties of G. Adenosine deaminase is capable of deaminating (i.e., removing an amine group) adenine of a deoxyadenosine residue in deoxyribonucleic acid (DNA). In some embodiments, an A-to-G base editor further comprises an inhibitor of inosine base excision repair, for example, a uracil glycosylase inhibitor (UGI) domain or a catalytically inactive inosine specific nuclease. Without wishing to be bound by any particular theory, the UGI domain or catalytically inactive inosine specific nuclease can inhibit or prevent base excision repair of a deaminated adenosine residue (e.g., inosine), which can improve the activity or efficiency of the base editor.

[0279] A base editor comprising an adenosine deaminase can act on any polynucleotide, including DNA, RNA and DNA-RNA hybrids. In certain embodiments, a base editor comprising an adenosine deaminase can deaminate a target A of a polynucleotide comprising RNA. For example, the base editor can comprise an adenosine deaminase domain capable of deaminating a target A of an RNA polynucleotide and/or a DNA-RNA hybrid polynucleotide. In an embodiment, an adenosine deaminase incorporated into a base editor comprises all or a portion of adenosine deaminase acting on RNA (ADAR, e.g., ADAR1 or ADAR2) or tRNA (ADAT). A base editor comprising an adenosine deaminase domain can also be capable of deaminating an A nucleobase of a DNA polynucleotide. In an embodiment an adenosine deaminase domain of a base editor comprises all or a portion of an ADAT comprising one or more mutations which permit the ADAT to deaminate a target A in DNA. For example, the base editor can comprise all or a portion of an ADAT from Escherichia coli (EcTadA) comprising one or more of the following mutations: D108N, A106V, D147Y, E155V, L84F, H123Y, 1156F, or a corresponding mutation in another adenosine deaminase. Exemplary ADAT homolog polypeptide sequences are provided in the Sequence Listing as SEQ ID NOs: 1 and 309-315.

[0280] The adenosine deaminase can be derived from any suitable organism (e.g., E. coli). In some embodiments, the adenosine deaminase is from a prokaryote. In some embodiments, the adenosine deaminase is from a bacterium. In some embodiments, the adenosine deaminase is from Escherichia coli, Staphylococcus aureus, Salmonella typhi, Shewanella putrefaciens, Haemophilus influenzae, Caulobacter crescentus, or Bacillus subtilis. In some embodiments, the adenosine deaminase is from E. coli. In some embodiments, the adenine deaminase is a naturally-occurring adenosine deaminase that includes one or more mutations corresponding to any of the mutations provided herein (e.g., mutations in ecTadA). The corresponding residue in any homologous protein can be identified by e.g., sequence alignment and determination of homologous residues. The mutations in any naturally-occurring adenosine deaminase (e.g., having homology to ecTadA) that correspond to any of the mutations described herein (e.g., any of the mutations identified in ecTadA) can be generated accordingly.

[0281] In some embodiments, the adenosine deaminase comprises an amino acid sequence that is at least 60%, at least 65%, at least 70%, at least 75%, at least 80%, at least 85%, at least 90%, at least 95%, at least 96%, at least 97%, at least 98%, at least 99%, or at least 99.5% identical to any one of the amino acid sequences set forth in any of the adenosine deaminases provided herein. It should be appreciated that adenosine deaminases provided herein may include one or more mutations (e.g., any of the mutations provided herein). The disclosure provides any deaminase domains with a certain percent identify plus any of the mutations or combinations thereof described herein. In some embodiments, the adenosine deaminase comprises an amino acid sequence that has 1, 2, 3, 4, 5, 6, 7, 8, 9, 10, 11, 12, 13, 14, 15, 16, 17, 18, 19, 20, 21, 22, 21, 24, 25, 26, 27, 28, 29, 30, 31, 32, 33, 34, 35, 36, 37, 38, 39, 40, 41, 42, 43, 44, 45, 46, 47, 48, 49, 50, or more mutations compared to a reference sequence, or any of the adenosine deaminases provided herein. In some embodiments, the adenosine deaminase comprises an amino acid sequence that has at least 5, at least 10, at least 15, at least 20, at least 25, at least 30, at least 35, at least 40, at least 45, at least 50, at least 60, at least 70, at least 80, at least 90, at least 100, at least 110, at least 120, at least 130, at least 140, at least 150, at least 160, or at least 170 identical contiguous amino acid residues as compared to any one of the amino acid sequences known in the art or described herein.

[0282] It should be appreciated that any of the mutations provided herein (e.g., based on the TadA reference sequence) can be introduced into other adenosine deaminases, such as E. coli TadA (ecTadA), S. aureus TadA (saTadA), or other adenosine deaminases (e.g., bacterial adenosine deaminases). It would be apparent to the skilled artisan that additional deaminases may similarly be aligned to identify homologous amino acid residues that can be mutated as provided herein. Thus, any of the mutations identified in the TadA reference sequence can be made in other adenosine deaminases (e.g., ecTada) that have homologous amino acid residues. It should also be appreciated that any of the mutations provided herein can be made individually or in any combination in the TadA reference sequence or another adenosine deaminase.

[0283] In some embodiments, the adenosine deaminase comprises a D108X mutation in the TadA reference sequence, or a corresponding mutation in another adenosine deaminase, where X indicates any amino acid other than the corresponding amino acid in the wild-type adenosine deaminase. In some embodiments, the adenosine deaminase comprises a D108G, D108N, D108V, D108A, or D108Y mutation in TadA reference sequence, or a corresponding mutation in another adenosine deaminase. It should be appreciated, however, that additional deaminases may similarly be aligned to identify homologous amino acid residues that can be mutated as provided herein.

[0284] In some embodiments, the adenosine deaminase comprises an A106X mutation in TadA reference sequence, or a corresponding mutation in another adenosine deaminase, where X indicates any amino acid other than the corresponding amino acid in the wild-type adenosine deaminase. In some embodiments, the adenosine deaminase comprises an A106V mutation in TadA reference sequence, or a corresponding mutation in another adenosine deaminase (e.g. ecTadA).

[0285] In some embodiments, the adenosine deaminase comprises a E155X mutation in TadA reference sequence, or a corresponding mutation in another adenosine deaminase, where the presence of X indicates any amino acid other than the corresponding amino acid in the wild-type adenosine deaminase. In some embodiments, the adenosine deaminase comprises a E155D, E155G, or E155V mutation in TadA reference sequence, or a corresponding mutation in another adenosine deaminase (e.g., ecTadA).

[0286] In some embodiments, the adenosine deaminase comprises a D147X mutation in TadA reference sequence, or a corresponding mutation in another adenosine deaminase, where the presence of X indicates any amino acid other than the corresponding amino acid in the wild-type adenosine deaminase. In some embodiments, the adenosine deaminase comprises a D147Y, mutation in TadA reference sequence, or a corresponding mutation in another adenosine deaminase (e.g., ecTadA).

[0287] In some embodiments, the adenosine deaminase comprises an A106X, E155X, or D147X, mutation in the TadA reference sequence, or a corresponding mutation in another adenosine deaminase (e.g., ecTadA), where X indicates any amino acid other than the corresponding amino acid in the wild-type adenosine deaminase. In some embodiments, the adenosine deaminase comprises an E155D, E155G, or E155V mutation. In some embodiments, the adenosine deaminase comprises a D147Y.

[0288] It should also be appreciated that any of the mutations provided herein may be made individually or in any combination in ecTadA or another adenosine deaminase. For example, an adenosine deaminase may contain a D108N, a A106V, a E155V, and/or a D147Y mutation in TadA reference sequence, or a corresponding mutation in another adenosine deaminase (e.g., ecTadA). In some embodiments, an adenosine deaminase comprises the following group of mutations (groups of mutations are separated by a “;”) in TadA reference sequence, or corresponding mutations in another adenosine deaminase: D108N and A106V; D108N and E155V; D108N and D147Y; A106V and E155V; A106V and D147Y; E155V and D147Y; D108N, A106V, and E155V; D108N, A106V, and D147Y; D108N, E155V, and D147Y; A106V, E155V, and D147Y; and D108N, A106V, E155V, and D147Y. It should be appreciated, however, that any combination of corresponding mutations provided herein may be made in an adenosine deaminase (e.g., ecTadA).

[0289] In some embodiments, the adenosine deaminase comprises a combination of mutations in a TadA reference sequence (e.g., TadA*7.10), or corresponding mutations in another adenosine deaminase: V82G+Y147T+Q154S; I76Y+V82G+Y147T+Q154S; L36H+V82G+Y147T+Q154S+N157K; V82G+Y147D+F149Y+Q154S+D167N; L36H+V82G+Y147D+F149Y+Q154S+N157K+D167N; L36H+176Y+V82G+Y147T+Q154S+N157K; I76Y+V82G+Y147D+F149Y+Q154S+D167N; or L36H+I76Y+V82G+Y147D+F149Y+Q154S+N157K+D167N.

[0290] In some embodiments, the adenosine deaminase comprises one or more of a H8X, T17X, L18X, W23X, L34X, W45X, R51X, A56X, E59X, E85X, M94X, I95X, V102X, F104X, A106X, R107X, D108X, K110X, M118X, N127X, A138X, F149X, M151X, R153X, Q154X, 1156X, and/or K157X mutation in TadA reference sequence, or one or more corresponding mutations in another adenosine deaminase, where the presence of X indicates any amino acid other than the corresponding amino acid in the wild-type adenosine deaminase. In some embodiments, the adenosine deaminase comprises one or more of H8Y, T17S, L18E, W23L, L34S, W45L, R51H, A56E, or A56S, E59G, E85K, or E85G, M94L, I95L, V102A, F104L, A106V, R107C, or R107H, or R107P, D108G, or D108N, or D108V, or D108A, or D108Y, K110I, M118K, N127S, A138V, F149Y, M151V, R153C, Q154L, 1156D, and/or K157R mutation in TadA reference sequence, or one or more corresponding mutations in another adenosine deaminase.

[0291] In some embodiments, the adenosine deaminase comprises one or more of a H8X, D108X, and/or N127X mutation in TadA reference sequence, or one or more corresponding mutations in another adenosine deaminase, where X indicates the presence of any amino acid. In some embodiments, the adenosine deaminase comprises one or more of a H8Y, D108N, and/or N127S mutation in TadA reference sequence, or one or more corresponding mutations in another adenosine deaminase.

[0292] In some embodiments, the adenosine deaminase comprises one or more of H8X, R26X, M61X, L68X, M70X, A106X, D108X, A109X, N127X, D147X, R152X, Q154X, E155X, K161X, Q163X, and/or T166X mutation in TadA reference sequence, or one or more corresponding mutations in another adenosine deaminase, where X indicates the presence of any amino acid other than the corresponding amino acid in the wild-type adenosine deaminase. In some embodiments, the adenosine deaminase comprises one or more of H8Y, R26W, M61I, L68Q, M70V, A106T, D108N, A109T, N127S, D147Y, R152C, Q154H or Q154R, E155G or E155V or E155D, K161Q, Q163H, and/or T166P mutation in TadA reference sequence, or one or more corresponding mutations in another adenosine deaminase.

[0293] In some embodiments, the adenosine deaminase comprises one, two, three, four, five, or six mutations selected from the group consisting of H8X, D108X, N127X, D147X, R152X, and Q154X in TadA reference sequence, or a corresponding mutation or mutations in another adenosine deaminase (e.g., ecTadA), where X indicates the presence of any amino acid other than the corresponding amino acid in the wild-type adenosine deaminase. In some embodiments, the adenosine deaminase comprises one, two, three, four, five, six, seven, or eight mutations selected from the group consisting of H8X, M61X, M70X, D108X, N127X, Q154X, E155X, and Q163X in TadA reference sequence, or a corresponding mutation or mutations in another adenosine deaminase (e.g., ecTadA), where X indicates the presence of any amino acid other than the corresponding amino acid in the wild-type adenosine deaminase. In some embodiments, the adenosine deaminase comprises one, two, three, four, or five, mutations selected from the group consisting of H8X, D108X, N127X, E155X, and T166X in TadA reference sequence, or a corresponding mutation or mutations in another adenosine deaminase (e.g., ecTadA), where X indicates the presence of any amino acid other than the corresponding amino acid in the wild-type adenosine deaminase.

[0294] In some embodiments, the adenosine deaminase comprises one, two, three, four, five, or six mutations selected from the group consisting of H8X, A106X, and D108X, or a corresponding mutation or mutations in another adenosine deaminase, where X indicates the presence of any amino acid other than the corresponding amino acid in the wild-type adenosine deaminase. In some embodiments, the adenosine deaminase comprises one, two, three, four, five, six, seven, or eight mutations selected from the group consisting of H8X, R26X, L68X, D108X, N127X, D147X, and E155X, or a corresponding mutation or mutations in another adenosine deaminase, where X indicates the presence of any amino acid other than the corresponding amino acid in the wild-type adenosine deaminase.

[0295] In some embodiments, the adenosine deaminase comprises one, two, three, four, five, six, or seven mutations selected from the group consisting of H8X, R126X, L68X, D108X, N127X, D147X, and E155X in TadA reference sequence, or a corresponding mutation or mutations in another adenosine deaminase, where X indicates the presence of any amino acid other than the corresponding amino acid in the wild-type adenosine deaminase. In some embodiments, the adenosine deaminase comprises one, two, three, four, or five mutations selected from the group consisting of H8X, D108X, A109X, N127X, and E155X in TadA reference sequence, or a corresponding mutation or mutations in another adenosine deaminase, where X indicates the presence of any amino acid other than the corresponding amino acid in the wild-type adenosine deaminase.

[0296] In some embodiments, the adenosine deaminase comprises one, two, three, four, five, or six mutations selected from the group consisting of H8Y, D108N, N127S, D147Y, R152C, and Q154H in TadA reference sequence, or a corresponding mutation or mutations in another adenosine deaminase (e.g., ecTadA). In some embodiments, the adenosine deaminase comprises one, two, three, four, five, six, seven, or eight mutations selected from the group consisting of H8Y, M61I, M70V, D108N, N127S, Q154R, E155G and Q163H in TadA reference sequence, or a corresponding mutation or mutations in another adenosine deaminase (e.g., ecTadA). In some embodiments, the adenosine deaminase comprises one, two, three, four, or five, mutations selected from the group consisting of H8Y, D108N, N127S, E155V, and T166P in TadA reference sequence, or a corresponding mutation or mutations in another adenosine deaminase (e.g., ecTadA). In some embodiments, the adenosine deaminase comprises one, two, three, four, five, or six mutations selected from the group consisting of H8Y, A106T, D108N, N127S, E155D, and K161Q in TadA reference sequence, or a corresponding mutation or mutations in another adenosine deaminase (e.g., ecTadA). In some embodiments, the adenosine deaminase comprises one, two, three, four, five, six, seven, or eight mutations selected from the group consisting of H8Y, R26W, L68Q, D108N, N127S, D147Y, and E155V in TadA reference sequence, or a corresponding mutation or mutations in another adenosine deaminase (e.g. ecTadA). In some embodiments, the adenosine deaminase comprises one, two, three, four, or five, mutations selected from the group consisting of H8Y, D108N, A109T, N127S, and E155G in TadA reference sequence, or a corresponding mutation or mutations in another adenosine deaminase (e.g., ecTadA).

[0297] In some embodiments, the adenosine deaminase comprises one or more of the or one or more corresponding mutations in another adenosine deaminase. In some embodiments, the adenosine deaminase comprises a D108N, D108G, or D108V mutation in TadA reference sequence, or corresponding mutations in another adenosine deaminase. In some embodiments, the adenosine deaminase comprises a A106V and D108N mutation in TadA reference sequence, or corresponding mutations in another adenosine deaminase. In some embodiments, the adenosine deaminase comprises R107C and D108N mutations in TadA reference sequence, or corresponding mutations in another adenosine deaminase. In some embodiments, the adenosine deaminase comprises a H8Y, D108N, N127S, D147Y, and Q154H mutation in TadA reference sequence, or corresponding mutations in another adenosine deaminase. In some embodiments, the adenosine deaminase comprises a H8Y, D108N, N127S, D147Y, and E155V mutation in TadA reference sequence, or corresponding mutations in another adenosine deaminase. In some embodiments, the adenosine deaminase comprises a D108N, D147Y, and E155V mutation in TadA reference sequence, or corresponding mutations in another adenosine deaminase. In some embodiments, the adenosine deaminase comprises a H8Y, D108N, and N127S mutation in TadA reference sequence, or corresponding mutations in another adenosine deaminase. In some embodiments, the adenosine deaminase comprises a A106V, D108N, D147Y, and E155V mutation in TadA reference sequence, or corresponding mutations in another adenosine deaminase (e.g., ecTadA).

[0298] In some embodiments, the adenosine deaminase comprises one or more of S2X, H8X, I49X, L84X, H123X, N127X, I156X, and/or K160X mutation in TadA reference sequence, or one or more corresponding mutations in another adenosine deaminase, where the presence of X indicates any amino acid other than the corresponding amino acid in the wild-type adenosine deaminase. In some embodiments, the adenosine deaminase comprises one or more of S2A, H8Y, I49F, L84F, H123Y, N127S, I156F, and/or K160S mutation in TadA reference sequence, or one or more corresponding mutations in another adenosine deaminase (e.g., ecTadA).

[0299] In some embodiments, the adenosine deaminase comprises an L84X mutation adenosine deaminase, where X indicates any amino acid other than the corresponding amino acid in the wild-type adenosine deaminase. In some embodiments, the adenosine deaminase comprises an L84F mutation in TadA reference sequence, or a corresponding mutation in another adenosine deaminase (e.g., ecTadA).

[0300] In some embodiments, the adenosine deaminase comprises an H123X mutation in TadA reference sequence, or a corresponding mutation in another adenosine deaminase, where X indicates any amino acid other than the corresponding amino acid in the wild-type adenosine deaminase. In some embodiments, the adenosine deaminase comprises an H123Y mutation in TadA reference sequence, or a corresponding mutation in another adenosine deaminase.

[0301] In some embodiments, the adenosine deaminase comprises an I156X mutation in TadA reference sequence, or a corresponding mutation in another adenosine deaminase, where X indicates any amino acid other than the corresponding amino acid in the wild-type adenosine deaminase. In some embodiments, the adenosine deaminase comprises an I156F mutation in TadA reference sequence, or a corresponding mutation in another adenosine deaminase.

[0302] In some embodiments, the adenosine deaminase comprises one, two, three, four, five, six, or seven mutations selected from the group consisting of L84X, A106X, D108X, H123X, D147X, E155X, and I156X in TadA reference sequence, or a corresponding mutation or mutations in another adenosine deaminase, where X indicates the presence of any amino acid other than the corresponding amino acid in the wild-type adenosine deaminase. In some embodiments, the adenosine deaminase comprises one, two, three, four, five, or six mutations selected from the group consisting of S2X, I49X, A106X, D108X, D147X, and E155X in TadA reference sequence, or a corresponding mutation or mutations in another adenosine deaminase, where X indicates the presence of any amino acid other than the corresponding amino acid in the wild-type adenosine deaminase. In some embodiments, the adenosine deaminase comprises one, two, three, four, or five mutations selected from the group consisting of H8X, A106X, D108X, N127X, and K160X in TadA reference sequence, or a corresponding mutation or mutations in another adenosine deaminase, where X indicates the presence of any amino acid other than the corresponding amino acid in the wild-type adenosine deaminase.

[0303] In some embodiments, the adenosine deaminase comprises one, two, three, four, five, six, or seven mutations selected from the group consisting of L84F, A106V, D108N, H123Y, D147Y, E155V, and I156F in TadA reference sequence, or a corresponding mutation or mutations in another adenosine deaminase. In some embodiments, the adenosine deaminase comprises one, two, three, four, five, or six mutations selected from the group consisting of S2A, I49F, A106V, D108N, D147Y, and E155V in TadA reference sequence.

[0304] In some embodiments, the adenosine deaminase comprises one, two, three, four, or five mutations selected from the group consisting of H8Y, A106T, D108N, N127S, and K160S in TadA reference sequence, or a corresponding mutation or mutations in another adenosine deaminase.

[0305] In some embodiments, the adenosine deaminase comprises one or more of a E25X, R26X, R107X, A142X, and/or A143X mutation in TadA reference sequence, or one or more corresponding mutations in another adenosine deaminase, where the presence of X indicates any amino acid other than the corresponding amino acid in the wild-type adenosine deaminase. In some embodiments, the adenosine deaminase comprises one or more of E25M, E25D, E25A, E25R, E25V, E25S, E25Y, R26G, R26N, R26Q, R26C, R26L, R26K, R107P, R107K, R107A, R107N, R107W, R107H, R107S, A142N, A142D, A142G, A143D, A143G, A143E, A143L, A143W, A143M, A143S, A143Q, and/or A143R mutation in TadA reference sequence, or one or more corresponding mutations in another adenosine deaminase. In some embodiments, the adenosine deaminase comprises one or more of the mutations described herein corresponding to TadA reference sequence, or one or more corresponding mutations in another adenosine deaminase.

[0306] In some embodiments, the adenosine deaminase comprises an E25X mutation in TadA reference sequence, or a corresponding mutation in another adenosine deaminase, where X indicates any amino acid other than the corresponding amino acid in the wild-type adenosine deaminase. In some embodiments, the adenosine deaminase comprises an E25M, E25D, E25A, E25R, E25V, E25S, or E25Y mutation in TadA reference sequence, or a corresponding mutation in another adenosine deaminase (e.g., ecTadA).

[0307] In some embodiments, the adenosine deaminase comprises an R26X mutation in TadA reference sequence, or a corresponding mutation in another adenosine deaminase, where X indicates any amino acid other than the corresponding amino acid in the wild-type adenosine deaminase. In some embodiments, the adenosine deaminase comprises R26G, R26N, R26Q, R26C, R26L, or R26K mutation in TadA reference sequence, or a corresponding mutation in another adenosine deaminase (e.g., ecTadA).

[0308] In some embodiments, the adenosine deaminase comprises an R107X mutation in TadA reference sequence, or a corresponding mutation in another adenosine deaminase, where X indicates any amino acid other than the corresponding amino acid in the wild-type adenosine deaminase. In some embodiments, the adenosine deaminase comprises an R107P, R107K, R107A, R107N, R107W, R107H, or R107S mutation in TadA reference sequence, or a corresponding mutation in another adenosine deaminase (e.g., ecTadA).

[0309] In some embodiments, the adenosine deaminase comprises an A142X mutation in TadA reference sequence, or a corresponding mutation in another adenosine deaminase, where X indicates any amino acid other than the corresponding amino acid in the wild-type adenosine deaminase. In some embodiments, the adenosine deaminase comprises an A142N, A142D, A142G, mutation in TadA reference sequence, or a corresponding mutation in another adenosine deaminase (e.g., ecTadA).

[0310] In some embodiments, the adenosine deaminase comprises an A143X mutation in TadA reference sequence, or a corresponding mutation in another adenosine deaminase, where X indicates any amino acid other than the corresponding amino acid in the wild-type adenosine deaminase. In some embodiments, the adenosine deaminase comprises an A143D, A143G, A143E, A143L, A143W, A143M, A143S, A143Q, and/or A143R mutation in TadA reference sequence, or a corresponding mutation in another adenosine deaminase (e.g., ecTadA).

[0311] In some embodiments, the adenosine deaminase comprises one or more of a H36X, N37X, P48X, I49X, R51X, M70X, N72X, D77X, E134X, S146X, Q154X, K157X, and/or K161X mutation in TadA reference sequence, or one or more corresponding mutations in another adenosine deaminase, where the presence of X indicates any amino acid other than the corresponding amino acid in the wild-type adenosine deaminase. In some embodiments, the adenosine deaminase comprises one or more of H36L, N37T, N37S, P48T, P48L, I49V, R51H, R51L, M70L, N72S, D77G, E134G, S146R, S146C, Q154H, K157N, and/or K161T mutation in TadA reference sequence, or one or more corresponding mutations in another adenosine deaminase (e.g., ecTadA).

[0312] In some embodiments, the adenosine deaminase comprises an H36X mutation in TadA reference sequence, or a corresponding mutation in another adenosine deaminase, where X indicates any amino acid other than the corresponding amino acid in the wild-type adenosine deaminase. In some embodiments, the adenosine deaminase comprises an H36L mutation in TadA reference sequence, or a corresponding mutation in another adenosine deaminase.

[0313] In some embodiments, the adenosine deaminase comprises an N37X mutation in TadA reference sequence, or a corresponding mutation in another adenosine deaminase, where X indicates any amino acid other than the corresponding amino acid in the wild-type adenosine deaminase. In some embodiments, the adenosine deaminase comprises an N37T or N37S mutation in TadA reference sequence, or a corresponding mutation in another adenosine deaminase.

[0314] In some embodiments, the adenosine deaminase comprises an P48X mutation in TadA reference sequence, or a corresponding mutation in another adenosine deaminase, where X indicates any amino acid other than the corresponding amino acid in the wild-type adenosine deaminase. In some embodiments, the adenosine deaminase comprises an P48T or P48L mutation in TadA reference sequence, or a corresponding mutation in another adenosine deaminase.

[0315] In some embodiments, the adenosine deaminase comprises an R51X mutation in TadA reference sequence, or a corresponding mutation in another adenosine deaminase, where X indicates any amino acid other than the corresponding amino acid in the wild-type adenosine deaminase. In some embodiments, the adenosine deaminase comprises an R51H or R51L mutation in TadA reference sequence, or a corresponding mutation in another adenosine deaminase.

[0316] In some embodiments, the adenosine deaminase comprises an S146X mutation in TadA reference sequence, or a corresponding mutation in another adenosine deaminase, where X indicates any amino acid other than the corresponding amino acid in the wild-type adenosine deaminase. In some embodiments, the adenosine deaminase comprises an S146R or S146C mutation in TadA reference sequence, or a corresponding mutation in another adenosine deaminase.

[0317] In some embodiments, the adenosine deaminase comprises an K157X mutation in TadA reference sequence, or a corresponding mutation in another adenosine deaminase, where X indicates any amino acid other than the corresponding amino acid in the wild-type adenosine deaminase. In some embodiments, the adenosine deaminase comprises a K157N mutation in TadA reference sequence, or a corresponding mutation in another adenosine deaminase.

[0318] In some embodiments, the adenosine deaminase comprises an P48X mutation in TadA reference sequence, or a corresponding mutation in another adenosine deaminase, where X indicates any amino acid other than the corresponding amino acid in the wild-type adenosine deaminase. In some embodiments, the adenosine deaminase comprises a P48S, P48T, or P48A mutation in TadA reference sequence, or a corresponding mutation in another adenosine deaminase.

[0319] In some embodiments, the adenosine deaminase comprises an A142X mutation in TadA reference sequence, or a corresponding mutation in another adenosine deaminase, where X indicates any amino acid other than the corresponding amino acid in the wild-type adenosine deaminase. In some embodiments, the adenosine deaminase comprises a A142N mutation in TadA reference sequence, or a corresponding mutation in another adenosine deaminase.

[0320] In some embodiments, the adenosine deaminase comprises an W23X mutation in TadA reference sequence, or a corresponding mutation in another adenosine deaminase, where X indicates any amino acid other than the corresponding amino acid in the wild-type adenosine deaminase. In some embodiments, the adenosine deaminase comprises a W23R or W23L mutation in TadA reference sequence, or a corresponding mutation in another adenosine deaminase.

[0321] In some embodiments, the adenosine deaminase comprises an R152X mutation in TadA reference sequence, or a corresponding mutation in another adenosine deaminase, where X indicates any amino acid other than the corresponding amino acid in the wild-type adenosine deaminase. In some embodiments, the adenosine deaminase comprises a R152P or R52H mutation in TadA reference sequence, or a corresponding mutation in another adenosine deaminase.

[0322] In one embodiment, the adenosine deaminase may comprise the mutations H36L, R51L, L84F, A106V, D108N, H123Y, S146C, D147Y, E155V, I156F, and K157N. In some embodiments, the adenosine deaminase comprises the following combination of mutations relative to TadA reference sequence, where each mutation of a combination is separated by a “_” and each combination of mutations is between parentheses:
[0323] (A106V_D108N),
[0324] (R107C_D108N),
[0325] (H8Y_D108N_N127S_D147Y_Q154H),
[0326] (H8Y_D108N_N127S_D147Y_E155V),
[0327] (D108N_D147Y_E155V),
[0328] (H8Y_D108N_N127S),
[0329] (H8Y_D108N_N127S_D147Y_Q154H),
[0330] (A106V_D108N_D147Y_E155V),
[0331] (D108Q_D147Y_E155V),
[0332] (D108M_D147Y_E155V),
[0333] (D108L_D147Y_E155V),
[0334] (D108K_D147Y_E155V),
[0335] (D108I_D147Y_E155V),
[0336] (D108F_D147Y_E155V),
[0337] (A106V_D108N_D147Y),
[0338] (A106V_D108M_D147Y_E155V),
[0339] (E59A_A106V_D108N_D147Y_E155V),
[0340] (E59A cat dead_A106V_D108N_D147Y_E155V),
[0341] (L84F_A106V_D108N_H123Y_D147Y_E155V_I156Y),
[0342] (L84F_A106V_D108N_H123Y_D147Y_E155V_I156F),
[0343] (D103A_D104N),
[0344] (G22P_D103A_D104N),
[0345] (D103A_D104N_S138A),
[0346] (R26G_L84F_A106V_R107H_D108N_H123Y_A142N_A143D_D147Y_E155V_I156F),
[0347] (E25G_R26G_L84F_A106V_R107H_D108N_H123Y_A142N_A143D_D147Y_E155V_I156F),
[0348] (E25D_R26G_L84F_A106V_R107K_D108N_H123Y_A142N_A143G_D147Y_E155V_I156F),
[0349] (R26Q_L84F_A106V_D108N_H123Y_A142N_D147Y_E155V_I156F),
[0350] (E25M_R26G_L84F_A106V_R107P_D108N_H123Y_A142N_A143D_D147Y_E155V_I156F),
[0351] (R26C_L84F_A106V_R107H_D108N_H123Y_A142N_D147Y_E155V_I156F),
[0352] (L84F_A106V_D108N_H123Y_A142N_A143L_D147Y_E155V_I156F),
[0353] (R26G_L84F_A106V_D108N_H123Y_A142N_D147Y_E155V_I156F),
[0354] (E25A_R26G_L84F_A106V_R107N_D108N_H123Y_A142N_A143E_D147Y_E155V_I156F),
[0355] (R26G_L84F_A106V_R107H_D108N_H123Y_A142N_A143D_D147Y_E155V_I156F),
[0356] (A106V_D108N_A142N_D147Y_E155V),
[0357] (R26G_A106V_D108N_A142N_D147Y_E155V),
[0358] (E25D_R26G_A106V_R107K_D108N_A142N_A143G_D147Y_E155V),
[0359] (R26G_A106V_D108N_R107H_A142N_A143D_D147Y_E155V),
[0360] (E25D_R26G_A106V_D108N_A142N_D147Y_E155V),
[0361] (A106V_R107K_D108N_A142N_D147Y_E155V),
[0362] (A106V_D108N_A142N_A143G_D147Y_E155V),
[0363] (A106V_D108N_A142N_A143L_D147Y_E155V),
[0364] (H36L_R51L_L84F_A106V_D108N_H123Y_S146C_D147Y_E155V_I156F_K157N),
[0365] (N37T_P48T_M70L_L84F_A106V_D108N_H123Y_D147Y_149V_E155V_1156F),
[0366] (N37S_L84F_A106V_D108N_H123Y_D147Y_E155V_I156F_K161T),
[0367] (H36L_L84F_A106V_D108N_H123Y_D147Y_Q154H_E155V_I156F),
[0368] (N72S_L84F_A106V_D108N_H123Y_S146R_D147Y_E155V_I156F),
[0369] (H36L_P48L_L84F_A106V_D108N_H123Y_E134G_D147Y_E155V_I156F),
[0370] (H36L_L84F_A106V_D108N_H123Y_D147Y_E155V_I156F_K157N)
[0371] (H36L_L84F_A106V_D108N_H123Y_S146C_D147Y_E155V_I156F),
[0372] (L84F_A106V_D108N_H123Y_S146R_D147Y_E155V_I156F_K161T),
[0373] (N37S_R51H_D77G_L84F_A106V_D108N_H123Y_D147Y_E155V_I156F),
[0374] (R51L_L84F_A106V_D108N_H123Y_D147Y_E155V_I156F_K157N),
[0375] (D24G_Q71R_L84F_H96L_A106V_D108N_H123Y_D147Y_E155V_I156F_K160E),
[0376] (H36L_G67V_L84F_A106V_D108N_H123Y_S146T_D147Y_E155V_I156F),
[0377] (Q71L_L84F_A106V_D108N_H123Y_L137M_A143E_D147Y_E155V_I156F),
[0378] (E25G_L84F_A106V_D108N_H123Y_D147Y_E155V_I156F_Q159L),
[0379] (L84F_A91T_F104I_A106V_D108N_H123Y_D147Y_E155V_I156F),
[0380] (N72D_L84F_A106V_D108N_H123Y_G125A_D147Y_E155V_I156F),
[0381] (P48S_L84F_S97C_A106V_D108N_H123Y_D147Y_E155V_I156F),
[0382] (W23G_L84F_A106V_D108N_H123Y_D147Y_E155V_I156F),
[0383] (D24G_P48L_Q71R_L84F_A106V_D108N_H123Y_D147Y_E155V_I156F_Q159L),
[0384] (L84F_A106V_D108N_H123Y_A142N_D147Y_E155V_I156F),
[0385] (H36L_R51L_L84F_A106V_D108N_H123Y_A142N_S146C_D147Y_E155V_I156F_K157N),
[0386] (N37S_L84F_A106V_D108N_H123Y_A142N_D147Y_E155V_I156F_K161T),
[0387] (L84F_A106V_D108N_D147Y_E155V_I156F),
[0388] (R51L_L84F_A106V_D108N_H123Y_S146C_D147Y_E155V_I156F_K157N_K161T),
[0389] (L84F_A106V_D108N_H123Y_S146C_D147Y_E155V_I156F_K161T),
[0390] (L84F_A106V_D108N_H123Y_S146C_D147Y_E155V_I156F_K157N_K160E_K161T),
[0391] (L84F_A106V_D108N_H123Y_S146C_D147Y_E155V_I156F_K157N_K160E),
[0392] (R74Q_L84F_A106V_D108N_H123Y_D147Y_E155V_I156F),
[0393] (R74A_L84F_A106V_D108N_H123Y_D147Y_E155V_I156F),
[0394] (L84F_A106V_D108N_H123Y_D147Y_E155V_I156F),
[0395] (R74Q_L84F_A106V_D108N_H123Y_D147Y_E155V_I156F),
[0396] (L84F_R98Q_A106V_D108N_H123Y_D147Y_E155V_I156F),
[0397] (L84F_A106V_D108N_H123Y_R129Q_D147Y_E155V_I156F),
[0398] (P48S_L84F_A106V_D108N_H123Y_A142N_D147Y_E155V_I156F),
[0399] (P48S_A142N),
[0400] (P48T_I49V_L84F_A106V_D108N_H123Y_A142N_D147Y_E155V_I156F_L157N),
[0401] (P48T_I49V_A142N),
[0402] (H36L_P48S_R51L_L84F_A106V_D108N_H123Y_S146C_D147Y_E155V_I156F_K157N),
[0403] (H36L_P48S_R51L_L84F_A106V_D108N_H123Y_S146C_A142N_D147Y_E155V_I156F
[0404] (H36L_P48T_I49V_R51L_L84F_A106V_D108N_H123Y_S146C_D147Y_E155V_I156F_K157N),
[0405] (H36L_P48T_I49V_R51L_L84F_A106V_D108N_H123Y_A142N_S146C_D147Y_E155V I156F_K157N),
[0406] (H36L_P48A_R51L_L84F_A106V_D108N_H123Y_S146C_D147Y_E155V_I156F_K157N),
[0407] (H36L_P48A_R51L_L84F_A106V_D108N_H123Y_A142N_S146C_D147Y_E155V_I156F_K157N),
[0408] (H36L_P48A_R51L_L84F_A106V_D108N_H123Y_S146C_A142N_D147Y_E155V_I156F_K157N),
[0409] (W23L_H36L_P48A_R51L_L84F_A106V_D108N_H123Y_S146C_D147Y_E155V_I156F_K157N),
[0410] (W23R_H36L_P48A_R51L_L84F_A106V_D108N_H123Y_S146C_D147Y_E155V_I156F_K157N),
[0411] (W23L_H36L_P48A_R51L_L84F_A106V_D108N_H123Y_S146R_D147Y_E155V_I156F_K161T),
[0412] (H36L_P48A_R51L_L84F_A106V_D108N_H123Y_S146C_D147Y_R152H_E155V_I156F_K157N),
[0413] (H36L_P48A_R51L_L84F_A106V_D108N_H123Y_S146C_D147Y_R152P_E155V_I156F_K157N),
[0414] (W23L_H36L_P48A_R51L_L84F_A106V_D108N_H123Y_S146C_D147Y_R152P_E155V_I156F_K157N),
[0415] (W23L_H36L_P48A_R51L_L84F_A106V_D108N_H123Y_A142A_S146C_D147Y_E155V_I156F_K157N),
[0416] (W23L_H36L_P48A_R51L_L84F_A106V_D108N_H123Y_A142A_S146C_D147Y_R152P_E155V_1156F_K157N),
[0417] (W23L_H36L_P48A_R51L_L84F_A106V_D108N_H123Y_S146R_D147Y_E155V_1156F_K161T),
[0418] (W23R_H36L_P48A_R51L_L84F_A106V_D108N_H123Y_S146C_D147Y_R152P_E155V_I156F_K157N), (H36L_P48A_R51L_L84F_A106V_D108N_H123Y_A142N_S146C_D147Y_R152P_E155 V_1156F_K157N).

[0419] In some embodiments, the TadA deaminase is TadA variant. In some embodiments, the TadA variant is TadA*7.10. In particular embodiments, the fusion proteins comprise a single TadA*7.10 domain (e.g., provided as a monomer). In other embodiments, the fusion protein comprises TadA*7.10 and TadA(wt), which are capable of forming heterodimers. In one embodiment, a fusion protein of the invention comprises a wild-type TadA linked to TadA*7.10, which is linked to Cas9 nickase.

[0420] In some embodiments, TadA*7.10 comprises at least one alteration. In some embodiments the adenosine deaminase comprises an alteration in the following sequence:

TadA*7.10
(SEQ ID NO: 1)
MSEVEFSHEYWMRHALTLAKRARDEREVPVGAVLVLNNRVIGEGWNRAI
GLHDPTAHAEIMALRQGGLVMQNYRLIDATLYVTFEPCVMCAGAMIHSR
IGRVVFGVRNAKTGAAGSLMDVLHYPGMNHRVEITEGILADECAALLCY
FFRMPRQVFNAQKKAQSSTD

[0421] In some embodiments, TadA*7.10 comprises an alteration at amino acid 82 and/or 166. In particular embodiments, TadA*7.10 comprises one or more of the following alterations: Y147T, Y147R, Q154S, Y123H, V82S, T166R, and/or Q154R. In other embodiments, a variant of TadA*7.10 comprises a combination of alterations selected from the group of: Y147T+Q154R; Y147T+Q154S; Y147R+Q154S; V82S+Q154S; V82S+Y147R; V82S+Q154R; V82S+Y123H; I76Y+V82S; V82S+Y123H+Y147T; V82S+Y123H+Y147R; V82S+Y123H+Q154R; Y147R+Q154R+Y123H; Y147R+Q154R+176Y; Y147R+Q154R+T166R; Y123H+Y147R+Q154R+I76Y; V82S+Y123H+Y147R+Q154R; and I76Y+V82S+Y123H+Y147R+Q154R.

[0422] In some embodiments, a variant of TadA*7.10 comprises one or more of alterations selected from the group of L36H, I76Y, V82G, Y147T, Y147D, F149Y, Q154S, N157K, and/or D167N. In some embodiments, a variant of TadA*7.10 comprises V82G, Y147T/D, Q154S, and one or more of L36H, I76Y, F149Y, N157K, and D167N. In other embodiments, a variant of TadA*7.10 comprises a combination of alterations selected from the group of: V82G+Y147T+Q154S; I76Y+V82G+Y147T+Q154S; L36H+V82G+Y147T+Q154S+N157K; V82G+Y147D+F149Y+Q154S+D167N; L36H+V82G+Y147D+F149Y+Q154S+N157K+D167N; L36H+I76Y+V82G+Y147T+Q154S+N157K; I76Y+V82G+Y147D+F149Y+Q154S+D167N; L36H+I76Y+V82G+Y147D+F149Y+Q154S+N157K+D167N.

[0423] In some embodiments, an adenosine deaminase variant (e.g., TadA*8) comprises a deletion. In some embodiments, an adenosine deaminase variant comprises a deletion of the C terminus. In particular embodiments, an adenosine deaminase variant comprises a deletion of the C terminus beginning at residue 149, 150, 151, 152, 153, 154, 155, 156, and 157, relative to TadA*7.10, the TadA reference sequence, or a corresponding mutation in another TadA.

[0424] In other embodiments, an adenosine deaminase variant (e.g., TadA*8) is a monomer comprising one or more of the following alterations: Y147T, Y147R, Q154S, Y123H, V82S, T166R, and/or Q154R, relative to TadA*7.10, the TadA reference sequence, or a corresponding mutation in another TadA. In other embodiments, the adenosine deaminase variant (TadA*8) is a monomer comprising a combination of alterations selected from the group of: Y147T+Q154R; Y147T+Q154S; Y147R+Q154S; V82S+Q154S; V82S+Y147R; V82S+Q154R; V82S+Y123H; I76Y+V82S; V82S+Y123H+Y147T; V82S+Y123H+Y147R; V82S+Y123H+Q154R; Y147R+Q154R+Y123H; Y147R+Q154R+176Y; Y147R+Q154R+T166R; Y123H+Y147R+Q154R+I76Y; V82S+Y123H+Y147R+Q154R; and I76Y+V82S+Y123H+Y147R+Q154R, relative to TadA*7.10, the TadA reference sequence, or a corresponding mutation in another TadA.

[0425] In other embodiments, the adenosine deaminase variant is a homodimer comprising two adenosine deaminase domains (e.g., TadA*8) each having one or more of the following alterations Y147T, Y147R, Q154S, Y123H, V82S, T166R, and/or Q154R, relative to TadA*7.10, the TadA reference sequence, or a corresponding mutation in another TadA. In other embodiments, the adenosine deaminase variant is a homodimer comprising two adenosine deaminase domains (e.g., TadA*8) each having a combination of alterations selected from the group of: Y147T+Q154R; Y147T+Q154S; Y147R+Q154S; V82S+Q154S; V82S+Y147R; V82S+Q154R; V82S+Y123H; I76Y+V82S; V82S+Y123H+Y147T; V82S+Y123H+Y147R; V82S+Y123H+Q154R; Y147R+Q154R+Y123H; Y147R+Q154R+176Y; Y147R+Q154R+T166R; Y123H+Y147R+Q154R+I76Y; V82S+Y123H+Y147R+Q154R; and I76Y+V82S+Y123H+Y147R+Q154R, relative to TadA*7.10, the TadA reference sequence, or a corresponding mutation in another TadA.

[0426] In other embodiments, a base editor of the disclosure comprising an adenosine deaminase variant (e.g., TadA*8) monomer comprising one or more of the following alterations: R26C, V88A, A109S, T111R, D119N, H122N, Y147D, F149Y, T166I and/or D167N, relative to TadA*7.10, the TadA reference sequence, or a corresponding mutation in another TadA. In other embodiments, the adenosine deaminase variant (TadA*8) monomer comprises a combination of alterations selected from the group of: R26C+A109S+T111R+D119N+H122N+Y147D+F149Y+T1661+D167N; V88A+A109S+T111R+D119N+H122N+F149Y+T1661+D167N; R26C+A109S+T111R+D119N+H122N+F149Y+T1661+D167N; V88A+T111R+D119N+F149Y; and A109S+T111R+D119N+H122N+Y147D+F149Y+T166I+D167N, relative to TadA*7.10, the TadA reference sequence, or a corresponding mutation in another TadA.

[0427] In some embodiments, an adenosine deaminase variant (e.g., MSP828) is a monomer comprising one or more of the following alterations L36H, I76Y, V82G, Y147T, Y147D, F149Y, Q154S, N157K, and/or D167N, relative to TadA*7.10, the TadA reference sequence, or a corresponding mutation in another TadA. In some embodiments, an adenosine deaminase variant (e.g., MSP828) is a monomer comprising V82G, Y147T/D, Q154S, and one or more of L36H, I76Y, F149Y, N157K, and D167N, relative to TadA*7.10, the TadA reference sequence, or a corresponding mutation in another TadA. In other embodiments, the adenosine deaminase variant (TadA variant) is a monomer comprising a combination of alterations selected from the group of: V82G+Y147T+Q154S; I76Y+V82G+Y147T+Q154S; L36H+V82G+Y147T+Q154S+N157K; V82G+Y147D+F149Y+Q154S+D167N; L36H+V82G+Y147D+F149Y+Q154S+N157K+D167N; L36H+I76Y+V82G+Y147T+Q154S+N157K; I76Y+V82G+Y147D+F149Y+Q154S+D167N; L36H+I76Y+V82G+Y147D+F149Y+Q154S+N157K+D167N, relative to TadA*7.10, the TadA reference sequence, or a corresponding mutation in another TadA.

[0428] In other embodiments, the adenosine deaminase variant is a heterodimer of a wild-type adenosine deaminase domain and an adenosine deaminase variant domain (e.g., TadA*8) comprising one or more of the following alterations Y147T, Y147R, Q154S, Y123H, V82S, T166R, and/or Q154R, relative to TadA*7.10, the TadA reference sequence, or a corresponding mutation in another TadA. In other embodiments, the adenosine deaminase variant is a heterodimer of a wild-type adenosine deaminase domain and an adenosine deaminase variant domain (e.g., TadA*8) comprising a combination of alterations selected from the group of: Y147T+Q154R; Y147T+Q154S; Y147R+Q154S; V82S+Q154S; V82S+Y147R; V82S+Q154R; V82S+Y123H; I76Y+V82S; V82S+Y123H+Y147T; V82S+Y123H+Y147R; V82S+Y123H+Q154R; Y147R+Q154R+Y123H; Y147R+Q154R+I76Y; Y147R+Q154R+T166R; Y123H+Y147R+Q154R+I76Y; V82S+Y123H+Y147R+Q154R; and I76Y+V82S+Y123H+Y147R+Q154R, relative to TadA*7.10, the TadA reference sequence, or a corresponding mutation in another TadA.

[0429] In other embodiments, a base editor of the disclosure comprising an adenosine deaminase variant (e.g., TadA*8) homodimer comprising two adenosine deaminase domains (e.g., TadA*8) each having one or more of the following alterations R26C, V88A, A109S, T111R, D119N, H122N, Y147D, F149Y, T166I and/or D167N, relative to TadA*7.10, the TadA reference sequence, or a corresponding mutation in another TadA. In other embodiments, the adenosine deaminase variant is a homodimer comprising two adenosine deaminase domains (e.g., TadA*8) each having a combination of alterations selected from the group of: R26C+A109S+T111R+D119N+H122N+Y147D+F149Y+T166I+D167N; V88A+A109S+T111R+D119N+H122N+F149Y+T1661+D167N; R26C+A109S+T111R+D119N+H122N+F149Y+T166I+D167N; V88A+T111R+D119N+F149Y; and A109S+T111R+D119N+H122N+Y147D+F149Y+T166I+D167N, relative to TadA*7.10, the TadA reference sequence, or a corresponding mutation in another TadA.

[0430] In some embodiments, an adenosine deaminase variant is a homodimer comprising two adenosine deaminase domains (e.g., TadA*7.10) each having one or more of the following alterations L36H, I76Y, V82G, Y147T, Y147D, F149Y, Q154S, N157K, and/or D167N, relative to TadA*7.10, the TadA reference sequence, or a corresponding mutation in another TadA. In some embodiments, an adenosine deaminase variant is a homodimer comprising two adenosine deaminase variant domains (e.g., MSP828) each having the following alterations V82G, Y147T/D, Q154S, and one or more of L36H, I76Y, F149Y, N157K, and D167N, relative to TadA*7.10, the TadA reference sequence, or a corresponding mutation in another TadA. In other embodiments, the adenosine deaminase variant is a homodimer comprising two adenosine deaminase domains (e.g., TadA*7.10) each having a combination of alterations selected from the group of: V82G+Y147T+Q154S; I76Y+V82G+Y147T+Q154S; L36H+V82G+Y147T+Q154S+N157K; V82G+Y147D+F149Y+Q154S+D167N; L36H+V82G+Y147D+F149Y+Q154S+N157K+D167N; L36H+I76Y+V82G+Y147T+Q154S+N157K; I76Y+V82G+Y147D+F149Y+Q154S+D167N; L36H+I76Y+V82G+Y147D+F149Y+Q154S+N157K+D167N, relative to TadA*7.10, the TadA reference sequence, or a corresponding mutation in another TadA.

[0431] In other embodiments, the adenosine deaminase variant is a heterodimer of a TadA*7.10 domain and an adenosine deaminase variant domain (e.g., TadA*8) comprising one or more of the following alterations Y147T, Y147R, Q154S, Y123H, V82S, T166R, and/or Q154R, relative to TadA*7.10, the TadA reference sequence, or a corresponding mutation in another TadA. In other embodiments, the adenosine deaminase variant is a heterodimer of a TadA*7.10 domain and an adenosine deaminase variant domain (e.g., TadA*8) comprising a combination of alterations selected from the group of Y147T+Q154R; Y147T+Q154S; Y147R+Q154S; V82S+Q154S; V82S+Y147R; V82S+Q154R; V82S+Y123H; I76Y+V82S; V82S+Y123H+Y147T; V82S+Y123H+Y147R; V82S+Y123H+Q154R; Y147R+Q154R+Y123H; Y147R+Q154R+I76Y; Y147R+Q154R+T166R; Y123H+Y147R+Q154R+I76Y; V82S+Y123H+Y147R+Q154R; and I76Y+V82S+Y123H+Y147R+Q154R, relative to TadA*7.10, the TadA reference sequence, or a corresponding mutation in another TadA.

[0432] In other embodiments, a base editor comprises a heterodimer of a wild-type adenosine deaminase domain and an adenosine deaminase variant domain (e.g., TadA*8) comprising one or more of the following alterations R26C, V88A, A109S, T111R, D119N, H122N, Y147D, F149Y, T166I and/or D167N, relative to TadA*7.10, the TadA reference sequence, or a corresponding mutation in another TadA. In other embodiments, the base editor comprises a heterodimer of a wild-type adenosine deaminase domain and an adenosine deaminase variant domain (e.g., TadA*8) comprising a combination of alterations selected from the group of: R26C+A109S+T111R+D119N+H122N+Y147D+F149Y+T166I+D167N; V88A+A109S+T111R+D119N+H122N+F149Y+T1661+D167N; R26C+A109S+T111R+D119N+H122N+F149Y+T166I+D167N; V88A+T111R+D119N+F149Y; and A109S+T111R+D119N+H122N+Y147D+F149Y+T166I+D167N, relative to TadA*7.10, the TadA reference sequence, or a corresponding mutation in another TadA.

[0433] In other embodiments, the adenosine deaminase variant is a heterodimer of a wild-type adenosine deaminase domain and an adenosine deaminase variant domain (e.g., TadA*7.10) comprising one or more of the following alterations L36H, I76Y, V82G, Y147T, Y147D, F149Y, Q154S, N157K, and/or D167N, relative to TadA*7.10, the TadA reference sequence, or a corresponding mutation in another TadA. In some embodiments, an adenosine deaminase variant is a heterodimer comprising a wild-type adenosine deaminase domain and an adenosine deaminase variant domain (e.g., MSP828) having the following alterations V82G, Y147T/D, Q154S, and one or more of L36H, I76Y, F149Y, N157K, and D167N, relative to TadA*7.10, the TadA reference sequence, or a corresponding mutation in another TadA. In other embodiments, the adenosine deaminase variant is a heterodimer of a wild-type adenosine deaminase domain and an adenosine deaminase variant domain (e.g., TadA*7.10) comprising a combination of alterations selected from the group of: V82G+Y147T+Q154S; I76Y+V82G+Y147T+Q154S; L36H+V82G+Y147T+Q154S+N157K; V82G+Y147D+F149Y+Q154S+D167N; L36H+V82G+Y147D+F149Y+Q154S+N157K+D167N; L36H+I76Y+V82G+Y147T+Q154S+N157K; I76Y+V82G+Y147D+F149Y+Q154S+D167N; L36H+I76Y+V82G+Y147D+F149Y+Q154S+N157K+D167N, relative to TadA*7.10, the TadA reference sequence, or a corresponding mutation in another TadA.

[0434] In other embodiments, the adenosine deaminase variant is a heterodimer of a TadA*7.10 domain and an adenosine deaminase variant domain (e.g., TadA*8) comprising one or more of the following alterations Y147T, Y147R, Q154S, Y123H, V82S, T166R, and/or Q154R, relative to TadA*7.10, the TadA reference sequence, or a corresponding mutation in another TadA. In other embodiments, the adenosine deaminase variant is a heterodimer of a TadA*7.10 domain and an adenosine deaminase variant domain (e.g., TadA*8) comprising a combination of alterations selected from the group of Y147T+Q154R; Y147T+Q154S; Y147R+Q154S; V82S+Q154S; V82S+Y147R; V82S+Q154R; V82S+Y123H; I76Y+V82S; V82S+Y123H+Y147T; V82S+Y123H+Y147R; V82S+Y123H+Q154R; Y147R+Q154R+Y123H; Y147R+Q154R+I76Y; Y147R+Q154R+T166R; Y123H+Y147R+Q154R+I76Y; V82S+Y123H+Y147R+Q154R; and I76Y+V82S+Y123H+Y147R+Q154R, relative to TadA*7.10, the TadA reference sequence, or a corresponding mutation in another TadA.

[0435] In particular embodiments, an adenosine deaminase heterodimer comprises a TadA*8 domain and an adenosine deaminase domain selected from Staphylococcus aureus (S. aureus) TadA, Bacillus subtilis (B. subtilis) TadA, Salmonella typhimurium (S. typhimurium) TadA, Shewanella putrefaciens (S. putrefaciens) TadA, Haemophilus influenzae F3031 (H. influenzae) TadA, Caulobacter crescentus (C.) TadA, Geobacter sulfurreducens (G. sulfurreducens) TadA, or TadA*7.10.

[0436] In some embodiments, an adenosine deaminase is a TadA*8. In one embodiment, an adenosine deaminase is a TadA*8 that comprises or consists essentially of the following sequence or a fragment thereof having adenosine deaminase activity:

(SEQ ID NO: 316)
MSEVEFSHEYWMRHALTLAKRARDEREVPVGAVLVLNNRVIGEGWNRAI
GLHDPTAHAEIMALRQGGLVMQNYRLIDATLYVTFEPCVMCAGAMIHSR
IGRVVFGVRNAKTGAAGSLMDVLHYPGMNHRVEITEGILADECAALLCT
FFRMPRQVFNAQKKAQSSTD

[0437] In some embodiments, the TadA*8 is truncated. In some embodiments, the truncated TadA*8 is missing 1, 2, 3, 4, 5, 6, 7, 8, 9, 10, 11, 12, 13, 14, 15, 6, 17, 18, 19, or 20 N-terminal amino acid residues relative to the full length TadA*8. In some embodiments, the truncated TadA*8 is missing 1, 2, 3, 4, 5, 6, 7, 8, 9, 10, 11, 12, 13, 14, 15, 6, 17, 18, 19, or 20 C-terminal amino acid residues relative to the full length TadA*8. In some embodiments the adenosine deaminase variant is a full-length TadA*8.

[0438] In some embodiments the TadA*8 is TadA*8.1, TadA*8.2, TadA*8.3, TadA*8.4, TadA*8.5, TadA*8.6, TadA*8.7, TadA*8.8, TadA*8.9, TadA*8.10, TadA*8.11, TadA*8.12, TadA*8.13, TadA*8.14, TadA*8.15, TadA*8.16, TadA*8.17, TadA*8.18, TadA*8.19, TadA*8.20, TadA*8.21, TadA*8.22, TadA*8.23, or TadA*8.24.

[0439] In other embodiments, a base editor of the disclosure comprising an adenosine deaminase variant (e.g., TadA*8) monomer comprising one or more of the following alterations: R26C, V88A, A109S, T111R, D119N, H122N, Y147D, F149Y, T166I and/or D167N, relative to TadA*7.10, the TadA reference sequence, or a corresponding mutation in another TadA. In other embodiments, the adenosine deaminase variant (TadA*8) monomer comprises a combination of alterations selected from the group of: R26C+A109S+T111R+D119N+H122N+Y147D+F149Y+T1661+D167N; V88A+A109S+T111R+D119N+H122N+F149Y+T1661+D167N; R26C+A109S+T111R+D119N+H122N+F149Y+T1661+D167N; V88A+T111R+D119N+F149Y; and A109S+T111R+D119N+H122N+Y147D+F149Y+T166I+D167N, relative to TadA*7.10, the TadA reference sequence, or a corresponding mutation in another TadA.

[0440] In other embodiments, a base editor comprises a heterodimer of a wild-type adenosine deaminase domain and an adenosine deaminase variant domain (e.g., TadA*8) comprising one or more of the following alterations R26C, V88A, A109S, T111R, D119N, H122N, Y147D, F149Y, T166I and/or D167N, relative to TadA*7.10, the TadA reference sequence, or a corresponding mutation in another TadA. In other embodiments, the base editor comprises a heterodimer of a wild-type adenosine deaminase domain and an adenosine deaminase variant domain (e.g., TadA*8) comprising a combination of alterations selected from the group of: R26C+A109S+T111R+D119N+H122N+Y147D+F149Y+T166I+D167N; V88A+A109S+T111R+D119N+H122N+F149Y+T1661+D167N; R26C+A109S+T111R+D119N+H122N+F149Y+T166I+D167N; V88A+T111R+D119N+F149Y; and A109S+T111R+D119N+H122N+Y147D+F149Y+T166I+D167N, relative to TadA*7.10, the TadA reference sequence, or a corresponding mutation in another TadA.

[0441] In other embodiments, a base editor comprises a heterodimer of a TadA*7.10 domain and an adenosine deaminase variant domain (e.g., TadA*8) comprising one or more of the following alterations R26C, V88A, A109S, T111R, D119N, H122N, Y147D, F149Y, T166I and/or D167N, relative to TadA*7.10, the TadA reference sequence, or a corresponding mutation in another TadA. In other embodiments, the base editor comprises a heterodimer of a TadA*7.10 domain and an adenosine deaminase variant domain (e.g., TadA*8) comprising a combination of alterations selected from the group of: R26C+A109S+T111R+D119N+H122N+Y147D+F149Y+T1661+D167N; V88A+A109S+T111R+D119N+H122N+F149Y+T1661+D167N; R26C+A109S+T111R+D119N+H122N+F149Y+T1661+D167N; V88A+T111R+D119N+F149Y; and A109S+T111R+D119N+H122N+Y147D+F149Y+T166I+D167N, relative to TadA*7.10, the TadA reference sequence, or a corresponding mutation in another TadA.

[0442] In other embodiments, the adenosine deaminase variant is a heterodimer of a TadA*7.10 domain and an adenosine deaminase variant domain (e.g., TadA*7.10) comprising one or more of the following alterations L36H, I76Y, V82G, Y147T, Y147D, F149Y, Q154S, N157K, and/or D167N, relative to TadA*7.10, the TadA reference sequence, or a corresponding mutation in another TadA. In some embodiments, an adenosine deaminase variant is a heterodimer comprising a TadA*7.10 domain and an adenosine deaminase variant domain (e.g., MSP828) having the following alterations V82G, Y147T/D, Q154S, and one or more of L36H, I76Y, F149Y, N157K, and D167N, relative to TadA*7.10, the TadA reference sequence, or a corresponding mutation in another TadA. In other embodiments, the adenosine deaminase variant is a heterodimer of a TadA*7.10 domain and an adenosine deaminase variant domain (e.g., TadA*7.10) comprising a combination of alterations selected from the group of: V82G+Y147T+Q154S; I76Y+V82G+Y147T+Q154S; L36H+V82G+Y147T+Q154S+N157K; V82G+Y147D+F149Y+Q154S+D167N; L36H+V82G+Y147D+F149Y+Q154S+N157K+D167N; L36H+I76Y+V82G+Y147T+Q154S+N157K; I76Y+V82G+Y147D+F149Y+Q154S+D167N; L36H+I76Y+V82G+Y147D+F149Y+Q154S+N157K+D167N, relative to TadA*7.10, the TadA reference sequence, or a corresponding mutation in another TadA.

[0443] In some embodiments, the TadA*8 is a variant as shown in Table 6. Table 6 shows certain amino acid position numbers in the TadA amino acid sequence and the amino acids present in those positions in the TadA-7.10 adenosine deaminase. Table 6 also shows amino acid changes in TadA variants relative to TadA-7.10 following phage-assisted non-continuous evolution (PANCE) and phage-assisted continuous evolution (PACE), as described in M. Richter et al., 2020, Nature Biotechnology, doi.org/10.1038/s41587-020-0453-z, the entire contents of which are incorporated by reference herein. In some embodiments, the TadA*8 is TadA*8a, TadA*8b, TadA*8c, TadA*8d, or TadA*8e. In some embodiments, the TadA*8 is TadA*8e.

TABLE 6
Select TadA*8 Variants

| | | TadA amino acid number | | | | | | | | | |
|---|---|---|---|---|---|---|---|---|---|---|---|
| | TadA | 26 | 88 | 109 | 111 | 119 | 122 | 147 | 149 | 166 | 167 |
| | TadA-7.10 | R | V | A | T | D | H | Y | F | T | D |
| PANCE 1 | | | | | R | | | | | | |
| PANCE 2 | | | | S/T | R | | | | | | |
| PACE | TadA-8a | C | | S | R | N | N | D | Y | I | N |
| | TadA-8b | | A | S | R | N | N | | Y | I | N |
| | TadA-8c | C | | S | R | N | N | | Y | I | N |
| | TadA-8d | | A | | R | N | | | Y | | |
| | TadA-8e | | | S | R | N | N | D | Y | I | N |

[0444] In some embodiments, the TadA variant is a variant as shown in Table 6.1. Table 6.1 shows certain amino acid position numbers in the TadA amino acid sequence and the amino acids present in those positions in the TadA*7.10 adenosine deaminase. In some embodiments, the TadA variant is MSP605, MSP680, MSP823, MSP824, MSP825, MSP827, MSP828, or MSP829. In some embodiments, the TadA variant is MSP828. In some embodiments, the TadA variant is MSP829.

TABLE 6.1
TadA Variants

| | TadA Amino Acid Number | | | | | | | |
|---|---|---|---|---|---|---|---|---|
| Variant | 36 | 76 | 82 | 147 | 149 | 154 | 157 | 167 |
| TadA-7.10 | L | I | V | Y | F | Q | N | D |
| MSP605 | | | G | T | | S | | |
| MSP680 | | Y | G | T | | S | | |
| MSP823 | H | | G | T | | S | K | |
| MSP824 | | | G | D | Y | S | | N |
| MSP825 | H | | G | D | Y | S | K | N |
| MSP827 | H | Y | G | T | | S | K | |
| MSP828 | | Y | G | D | Y | S | | N |
| MSP829 | H | Y | G | D | Y | S | K | N |

[0445] In one embodiment, a fusion protein of the invention comprises a wild-type TadA is linked to an adenosine deaminase variant described herein (e.g., TadA*8), which is linked to Cas9 nickase. In particular embodiments, the fusion proteins comprise a single TadA*8 domain (e.g., provided as a monomer). In other embodiments, the fusion protein comprises TadA*8 and TadA(wt), which are capable of forming heterodimers.

[0446] In some embodiments, the adenosine deaminase comprises an amino acid sequence that is at least 60%, at least 65%, at least 70%, at least 75%, at least 80%, at least 85%, at least 90%, at least 95%, at least 96%, at least 97%, at least 98%, at least 99%, or at least 99.5% identical to any one of the amino acid sequences set forth in any of the adenosine deaminases provided herein. It should be appreciated that adenosine deaminases provided herein may include one or more mutations (e.g., any of the mutations provided herein). The disclosure provides any deaminase domains with a certain percent identity plus any of the mutations or combinations thereof described herein. In some embodiments, the adenosine deaminase comprises an amino acid sequence that has 1, 2, 3, 4, 5, 6, 7, 8, 9, 10, 11, 12, 13, 14, 15, 16, 17, 18, 19, 20, 21, 22, 21, 24, 25, 26, 27, 28, 29, 30, 31, 32, 33, 34, 35, 36, 37, 38, 39, 40, 41, 42, 43, 44, 45, 46, 47, 48, 49, 50, or more mutations compared to a reference sequence, or any of the adenosine deaminases provided herein. In some embodiments, the adenosine deaminase comprises an amino acid sequence that has at least 5, at least 10, at least 15, at least 20, at least 25, at least 30, at least 35, at least 40, at least 45, at least 50, at least 60, at least 70, at least 80, at least 90, at least 100, at least 110, at least 120, at least 130, at least 140, at least 150, at least 160, or at least 170 identical contiguous amino acid residues as compared to any one of the amino acid sequences known in the art or described herein.

[0447] In particular embodiments, a TadA*8 comprises one or more mutations at any of the following positions shown in bold. In other embodiments, a TadA*8 comprises one or more mutations at any of the positions shown with underlining:

| (SEQ ID NO: 1) | |
|---|---|
| MSEVEFSHEY WMRHALTLAK RARDEREVPV GAVLVLNNRV IGEGWNRAIG | 50 |
| LHDPTAHAEI MALROGGLVM QNYRLIDATL YVTFEPCVMC AGAMIHSRIG | 100 |
| RVVFGVRNAK TGAAGSLMDV LHYPGMNHRV EITEGILADE CAALLCYFFR | 150 |
| MPRQVFNAQK KAQSSTD | |

[0448] For example, the TadA*8 comprises alterations at amino acid position 82 and/or 166 (e.g., V82S, T166R) alone or in combination with any one or more of the following Y147T, Y147R, Q154S, Y123H, and/or Q154R, relative to TadA*7.10, the TadA reference sequence, or a corresponding mutation in another TadA. In particular embodiments, a combination of alterations is selected from the group of: Y147T+Q154R; Y147T+Q154S; Y147R+Q154S; V82S+Q154S; V82S+Y147R; V82S+Q154R; V82S+Y123H; I76Y+V82S; V82S+Y123H+Y147T; V82S+Y123H+Y147R; V82S+Y123H+Q154R; Y147R+Q154R+Y123H; Y147R+Q154R+I76Y; Y147R+Q154R+T166R; Y123H+Y147R+Q154R+I76Y; V82S+Y123H+Y147R+Q154R; and I76Y+V82S+Y123H+Y147R+Q154R, relative to TadA*7.10, the TadA reference sequence, or a corresponding mutation in another TadA.

[0449] In some embodiments, the TadA*8 is truncated. In some embodiments, the truncated TadA*8 is missing 1, 2, 3, 4, 5, 6, 7, 8, 9, 10, 11, 12, 13, 14, 15, 6, 17, 18, 19, or 20 N-terminal amino acid residues relative to the full length TadA*8. In some embodiments, the truncated TadA*8 is missing 1, 2, 3, 4, 5, 6, 7, 8, 9, 10, 11, 12, 13, 14, 15, 6, 17, 18, 19, or 20 C-terminal amino acid residues relative to the full length TadA*8. In some embodiments the adenosine deaminase variant is a full-length TadA*8.

[0450] In one embodiment, a fusion protein of the invention comprises a wild-type TadA is linked to an adenosine deaminase variant described herein (e.g., TadA*8), which is linked to Cas9 nickase. In particular embodiments, the fusion proteins comprise a single TadA*8 domain (e.g., provided as a monomer). In other embodiments, the base editor comprises TadA*8 and TadA(wt), which are capable of forming heterodimers.

[0451] In particular embodiments, the fusion proteins comprise a single (e.g., provided as a monomer) TadA*8. In some embodiments, the TadA*8 is linked to a Cas9 nickase. In some embodiments, the fusion proteins of the invention comprise as a heterodimer of a wild-type TadA (TadA(wt)) linked to a TadA*8. In other embodiments, the fusion proteins of the invention comprise as a heterodimer of a TadA*7.10 linked to a TadA*8. In some embodiments, the base editor is ABE8 comprising a TadA*8 variant monomer. In some embodiments, the base editor is ABE8 comprising a heterodimer of a TadA*8 and a TadA(wt). In some embodiments, the base editor is ABE8 comprising a heterodimer of a TadA*8 and TadA*7.10. In some embodiments, the base editor is ABE8 comprising a heterodimer of a TadA*8. In some embodiments, the TadA*8 is selected from Table 6, 12, or 13. In some embodiments, the ABE8 is selected from Table 12, 13, or 15.

[0452] In some embodiments, the adenosine deaminase is a TadA*9 variant. In some embodiments, the adenosine deaminase is a TadA*9 variant selected from the variants described below and with reference to the following sequence (termed TadA*7.10):

(SEQ ID NO: 1)
MSEVEFSHEY WMRHALTLAK RARDEREVPV GAVLVLNNRV
IGEGWNRAIG LHDPTAHAEI MALRQGGLVM QNYRLIDATL
YVTFEPCVMC AGAMIHSRIG RVVFGVRNAK TGAAGSLMDV
LHYPGMNHRV EITEGILADE CAALLCYFFR MPRQVFNAQK
KAQSSTD

[0453] In some embodiments, an adenosine deaminase comprises one or more of the following alterations: R21N, R23H, E25F, N38G, L51W, P54C, M70V, Q71M, N72K, Y73S, V82T, M94V, P124W, T133K, D139L, D139M, C146R, and A158K. The one or more alternations are shown in the sequence above in underlining and bold font.

[0454] In some embodiments, an adenosine deaminase comprises one or more of the following combinations of alterations: V82S+Q154R+Y147R; V82S+Q154R+Y123H; V82S+Q154R+Y147R+Y123H; Q154R+Y147R+Y123H+I76Y+V82S; V82S+I76Y; V82S+Y147R; V82S+Y147R+Y123H; V82S+Q154R+Y123H; Q154R+Y147R+Y123H+I76Y; V82S+Y147R; V82S+Y147R+Y123H; V82S+Q154R+Y123H; V82S+Q154R+Y147R; V82S+Q154R+Y147R; Q154R+Y147R+Y123H+I76Y; Q154R+Y147R+Y123H+I76Y+V82S; I76Y_V82S_Y123H_Y147R_Q154R; Y147R+Q154R+H123H; and V82S+Q154R.

[0455] In some embodiments, an adenosine deaminase comprises one or more of the following combinations of alterations: E25F+V82S+Y123H, T133K+Y147R+Q154R; E25F+V82S+Y123H+Y147R+Q154R; L51W+V82S+Y123H+C146R+Y147R+Q154R; Y73S+V82S+Y123H+Y147R+Q154R; P54C+V82S+Y123H+Y147R+Q154R; N38G+V82T+Y123H+Y147R+Q154R; N72K+V82S+Y123H+D139L+Y147R+Q154R; E25F+V82S+Y123H+D139M+Y147R+Q154R; Q71M+V82S+Y123H+Y147R+Q154R; E25F+V82S+Y123H+T133K+Y147R+Q154R; E25F+V82S+Y123H+Y147R+Q154R; V82S+Y123H+P124W+Y147R+Q154R; L51W+V82S+Y123H+C146R+Y147R+Q154R; P54C+V82S+Y123H+Y147R+Q154R; Y73S+V82S+Y123H+Y147R+Q154R; N38G+V82T+Y123H+Y147R+Q154R; R23H+V82S+Y123H+Y147R+Q154R; R21N+V82S+Y123H+Y147R+Q154R; V82S+Y123H+Y147R+Q154R+A158K; N72K+V82S+Y123H+D139L+Y147R+Q154R; E25F+V82S+Y123H+D139M+Y147R+Q154R; and M70V+V82S+M94V+Y123H+Y147R+Q154R

[0456] In some embodiments, an adenosine deaminase comprises one or more of the following combinations of alterations: Q71M+V82S+Y123H+Y147R+Q154R; E25F+I76Y+V82S+Y123H+Y147R+Q154R; I76Y+V82T+Y123H+Y147R+Q154R; N38G+I76Y+V82S+Y123H+Y147R+Q154R; R23H+176Y+V82S+Y123H+Y147R+Q154R; P54C+I76Y+V82S+Y123H+Y147R+Q154R; R21N+I76Y+V82S+Y123H+Y147R+Q154R; 176Y+V82S+Y123H+D139M+Y147R+Q154R; Y73S+176Y+V82S+Y123H+Y147R+Q154R; E25F+I76Y+V82S+Y123H+Y147R+Q154R; I76Y+V82T+Y123H+Y147R+Q154R; N38G+I76Y+V82S+Y123H+Y147R+Q154R; R23H+I76Y+V82S+Y123H+Y147R+Q154R; P54C+I76Y+V82S+Y123H+Y147R+Q154R; R21N+I76Y+V82S+Y123H+Y147R+Q154R; I76Y+V82S+Y123H+D139M+Y147R+Q154R; Y73S+I76Y+V82S+Y123H+Y147R+Q154R; and V82S+Q154R; N72K_V82S+Y123H+Y147R+Q154R; Q71M_V82S+Y123H+Y147R+Q154R; V82S+Y123H+T133K+Y147R+Q154R; V82S+Y123H+T133K+Y147R+Q154R+A158K; M70V+Q71M+N72K+V82S+Y123H+Y147R+Q154R; N72K_V82S+Y123H+Y147R+Q154R; Q71M_V82S+Y123H+Y147R+Q154R; M70V+V82S+M94V+Y123H+Y147R+Q154R; V82S+Y123H+T133K+Y147R+Q154R; V82S+Y123H+T133K+Y147R+Q154R+A158K; and M70V+Q71M+N72K+V82S+Y123H+Y147R+Q154R. In some embodiments, the adenosine deaminase is expressed as a monomer. In other embodiments, the adenosine deaminase is expressed as a heterodimer. In some embodiments, the deaminase or other polypeptide sequence lacks a methionine, for example when included as a component of a fusion protein. This can alter the numbering of positions. However, the skilled person will understand that such corresponding mutations refer to the same mutation, e.g., Y73S and Y72S and D139M and D138M.

[0457] In some embodiments, the TadA*9 variant comprises the alterations described in Table 16 as described herein. In some embodiments, the TadA*9 variant is a monomer. In some embodiments, the TadA*9 variant is a heterodimer with a wild-type TadA adenosine deaminase. In some embodiments, the TadA*9 variant is a heterodimer with another TadA variant (e.g., TadA*8, TadA*9). Additional details of TadA*9 adenosine deaminases are described in International PCT Application No. PCT/2020/049975, which is incorporated herein by reference for its entirety.

[0458] Any of the mutations provided herein and any additional mutations (e.g., based on the ecTadA amino acid sequence) can be introduced into any other adenosine deaminases. Any of the mutations provided herein can be made individually or in any combination in TadA reference sequence or another adenosine deaminase (e.g., ecTadA).

[0459] Details of A to G nucleobase editing proteins are described in International PCT Application No. PCT/2017/045381 (WO2018/027078) and Gaudelli, N. M., et al., “Programmable base editing of A•T to G•C in genomic DNA without DNA cleavage” Nature, 551, 464-471 (2017), the entire contents of which are hereby incorporated by reference.

### C to T Editing

[0460] In some embodiments, a base editor disclosed herein comprises a fusion protein comprising cytidine deaminase capable of deaminating a target cytidine (C) base of a polynucleotide to produce uridine (U), which has the base pairing properties of thymine. In some embodiments, for example where the polynucleotide is double-stranded (e.g., DNA), the uridine base can then be substituted with a thymidine base (e.g., by cellular repair machinery) to give rise to a C:G to a T:A transition. In other embodiments, deamination of a C to U in a nucleic acid by a base editor cannot be accompanied by substitution of the U to a T.

[0461] The deamination of a target C in a polynucleotide to give rise to a U is a non-limiting example of a type of base editing that can be executed by a base editor described herein. In another example, a base editor comprising a cytidine deaminase domain can mediate conversion of a cytosine (C) base to a guanine (G) base. For example, a U of a polynucleotide produced by deamination of a cytidine by a cytidine deaminase domain of a base editor can be excised from the polynucleotide by a base excision repair mechanism (e.g., by a uracil DNA glycosylase (UDG) domain), producing an abasic site. The nucleobase opposite the abasic site can then be substituted (e.g., by base repair machinery) with another base, such as a C, by for example a translesion polymerase. Although it is typical for a nucleobase opposite an abasic site to be replaced with a C, other substitutions (e.g., A, G or T) can also occur.

[0462] Accordingly, in some embodiments a base editor described herein comprises a deamination domain (e.g., cytidine deaminase domain) capable of deaminating a target C to a U in a polynucleotide. Further, as described below, the base editor can comprise additional domains which facilitate conversion of the U resulting from deamination to, in some embodiments, a T or a G. For example, a base editor comprising a cytidine deaminase domain can further comprise a uracil glycosylase inhibitor (UGI) domain to mediate substitution of a U by a T, completing a C-to-T base editing event. In another example, a base editor can incorporate a translesion polymerase to improve the efficiency of C-to-G base editing, since a translesion polymerase can facilitate incorporation of a C opposite an abasic site (i.e., resulting in incorporation of a G at the abasic site, completing the C-to-G base editing event).

[0463] A base editor comprising a cytidine deaminase as a domain can deaminate a target C in any polynucleotide, including DNA, RNA and DNA-RNA hybrids. Typically, a cytidine deaminase catalyzes a C nucleobase that is positioned in the context of a single-stranded portion of a polynucleotide. In some embodiments, the entire polynucleotide comprising a target C can be single-stranded. For example, a cytidine deaminase incorporated into the base editor can deaminate a target C in a single-stranded RNA polynucleotide. In other embodiments, a base editor comprising a cytidine deaminase domain can act on a double-stranded polynucleotide, but the target C can be positioned in a portion of the polynucleotide which at the time of the deamination reaction is in a single-stranded state. For example, in embodiments where the NAGPB domain comprises a Cas9 domain, several nucleotides can be left unpaired during formation of the Cas9-gRNA-target DNA complex, resulting in formation of a Cas9 “R-loop complex”. These unpaired nucleotides can form a bubble of single-stranded DNA that can serve as a substrate for a single-strand specific nucleotide deaminase enzyme (e.g., cytidine deaminase).

[0464] In some embodiments, a cytidine deaminase of a base editor can comprise all or a portion of an apolipoprotein B mRNA editing complex (APOBEC) family deaminase. APOBEC is a family of evolutionarily conserved cytidine deaminases. Members of this family are C-to-U editing enzymes. The N-terminal domain of APOBEC like proteins is the catalytic domain, while the C-terminal domain is a pseudocatalytic domain. More specifically, the catalytic domain is a zinc dependent cytidine deaminase domain and is important for cytidine deamination. APOBEC family members include APOBEC1, APOBEC2, APOBEC3A, APOBEC3B, APOBEC3C, APOBEC3D (“APOBEC3E” now refers to this), APOBEC3F, APOBEC3G, APOBEC3H, APOBEC4, and Activation-induced (cytidine) deaminase. In some embodiments, a deaminase incorporated into a base editor comprises all or a portion of an APOBEC1 deaminase. In some embodiments, a deaminase incorporated into a base editor comprises all or a portion of APOBEC2 deaminase. In some embodiments, a deaminase incorporated into a base editor comprises all or a portion of is an APOBEC3 deaminase. In some embodiments, a deaminase incorporated into a base editor comprises all or a portion of an APOBEC3A deaminase. In some embodiments, a deaminase incorporated into a base editor comprises all or a portion of APOBEC3B deaminase. In some embodiments, a deaminase incorporated into a base editor comprises all or a portion of APOBEC3C deaminase. In some embodiments, a deaminase incorporated into a base editor comprises all or a portion of APOBEC3D deaminase. In some embodiments, a deaminase incorporated into a base editor comprises all or a portion of APOBEC3E deaminase. In some embodiments, a deaminase incorporated into a base editor comprises all or a portion of APOBEC3F deaminase. In some embodiments, a deaminase incorporated into a base editor comprises all or a portion of APOBEC3G deaminase. In some embodiments, a deaminase incorporated into a base editor comprises all or a portion of APOBEC3H deaminase. In some embodiments, a deaminase incorporated into a base editor comprises all or a portion of APOBEC4 deaminase. In some embodiments, a deaminase incorporated into a base editor comprises all or a portion of activation-induced deaminase (AID). In some embodiments a deaminase incorporated into a base editor comprises all or a portion of cytidine deaminase 1 (CDA1). It should be appreciated that a base editor can comprise a deaminase from any suitable organism (e.g., a human or a rat). In some embodiments, a deaminase domain of a base editor is from a human, chimpanzee, gorilla, monkey, cow, dog, rat, or mouse. In some embodiments, the deaminase domain of the base editor is derived from rat (e.g., rat APOBEC1). In some embodiments, the deaminase domain of the base editor is human APOBEC1. In some embodiments, the deaminase domain of the base editor is pmCDA1.

[0465] Other exemplary deaminases that can be fused to Cas9 according to aspects of this disclosure are provided below. In embodiments, the deaminases are activation-induced deaminases (AID). It should be understood that, in some embodiments, the active domain of the respective sequence can be used, e.g., the domain without a localizing signal (nuclear localization sequence, without nuclear export signal, cytoplasmic localizing signal).

[0466] Some aspects of the present disclosure are based on the recognition that modulating the deaminase domain catalytic activity of any of the fusion proteins described herein, for example by making point mutations in the deaminase domain, affect the processivity of the fusion proteins (e.g., base editors). For example, mutations that reduce, but do not eliminate, the catalytic activity of a deaminase domain within a base editing fusion protein can make it less likely that the deaminase domain will catalyze the deamination of a residue adjacent to a target residue, thereby narrowing the deamination window. The ability to narrow the deamination window can prevent unwanted deamination of residues adjacent to specific target residues, which can decrease or prevent off-target effects.

[0467] For example, in some embodiments, an APOBEC deaminase incorporated into a base editor can comprise one or more mutations selected from the group consisting of H121X, H122X, R126X, R126X, R118X, W90X, W90X, and R132X of rAPOBEC1, or one or more corresponding mutations in another APOBEC deaminase, wherein X is any amino acid. In some embodiments, an APOBEC deaminase incorporated into a base editor can comprise one or more mutations selected from the group consisting of H121R, H122R, R126A, R126E, RI 18A, W90A, W90Y, and R132E of rAPOBEC1, or one or more corresponding mutations in another APOBEC deaminase.

[0468] In some embodiments, an APOBEC deaminase incorporated into a base editor can comprise one or more mutations selected from the group consisting of D316X, D317X, R320X, R320X, R313X, W285X, W285X, R326X of hAPOBEC3G, or one or more corresponding mutations in another APOBEC deaminase, wherein X is any amino acid. In some embodiments, any of the fusion proteins provided herein comprise an APOBEC deaminase comprising one or more mutations selected from the group consisting of D316R, D317R, R320A, R320E, R313A, W285A, W285Y, R326E of hAPOBEC3G, or one or more corresponding mutations in another APOBEC deaminase.

[0469] In some embodiments, an APOBEC deaminase incorporated into a base editor can comprise a H121R and a H122R mutation of rAPOBEC1, or one or more corresponding mutations in another APOBEC deaminase. In some embodiments an APOBEC deaminase incorporated into a base editor can comprise an APOBEC deaminase comprising a R126A mutation of rAPOBEC1, or one or more corresponding mutations in another APOBEC deaminase. In some embodiments, an APOBEC deaminase incorporated into a base editor can comprise an APOBEC deaminase comprising a R126E mutation of rAPOBEC1, or one or more corresponding mutations in another APOBEC deaminase. In some embodiments, an APOBEC deaminase incorporated into a base editor can comprise an APOBEC deaminase comprising a R118A mutation of rAPOBEC1, or one or more corresponding mutations in another APOBEC deaminase. In some embodiments, an APOBEC deaminase incorporated into a base editor can comprise an APOBEC deaminase comprising a W90A mutation of rAPOBEC1, or one or more corresponding mutations in another APOBEC deaminase. In some embodiments, an APOBEC deaminase incorporated into a base editor can comprise an APOBEC deaminase comprising a W90Y mutation of rAPOBEC1, or one or more corresponding mutations in another APOBEC deaminase. In some embodiments, an APOBEC deaminase incorporated into a base editor can comprise an APOBEC deaminase comprising a R132E mutation of rAPOBEC1, or one or more corresponding mutations in another APOBEC deaminase. In some embodiments an APOBEC deaminase incorporated into a base editor can comprise an APOBEC deaminase comprising a W90Y and a R126E mutation of rAPOBEC1, or one or more corresponding mutations in another APOBEC deaminase. In some embodiments, an APOBEC deaminase incorporated into a base editor can comprise an APOBEC deaminase comprising a R126E and a R132E mutation of rAPOBEC1, or one or more corresponding mutations in another APOBEC deaminase. In some embodiments, an APOBEC deaminase incorporated into a base editor can comprise an APOBEC deaminase comprising a W90Y and a R132E mutation of rAPOBEC1, or one or more corresponding mutations in another APOBEC deaminase. In some embodiments, an APOBEC deaminase incorporated into a base editor can comprise an APOBEC deaminase comprising a W90Y, R126E, and R132E mutation of rAPOBEC1, or one or more corresponding mutations in another APOBEC deaminase.

[0470] In some embodiments, an APOBEC deaminase incorporated into a base editor can comprise an APOBEC deaminase comprising a D316R and a D317R mutation of hAPOBEC3G, or one or more corresponding mutations in another APOBEC deaminase. In some embodiments, any of the fusion proteins provided herein comprise an APOBEC deaminase comprising a R320A mutation of hAPOBEC3G, or one or more corresponding mutations in another APOBEC deaminase. In some embodiments, an APOBEC deaminase incorporated into a base editor can comprise an APOBEC deaminase comprising a R320E mutation of hAPOBEC3G, or one or more corresponding mutations in another APOBEC deaminase. In some embodiments, an APOBEC deaminase incorporated into a base editor can comprise an APOBEC deaminase comprising a R313A mutation of hAPOBEC3G, or one or more corresponding mutations in another APOBEC deaminase. In some embodiments, an APOBEC deaminase incorporated into a base editor can comprise an APOBEC deaminase comprising a W285A mutation of hAPOBEC3G, or one or more corresponding mutations in another APOBEC deaminase. In some embodiments, an APOBEC deaminase incorporated into a base editor can comprise an APOBEC deaminase comprising a W285Y mutation of hAPOBEC3G, or one or more corresponding mutations in another APOBEC deaminase. In some embodiments, an APOBEC deaminase incorporated into a base editor can comprise an APOBEC deaminase comprising a R326E mutation of hAPOBEC3G, or one or more corresponding mutations in another APOBEC deaminase. In some embodiments, an APOBEC deaminase incorporated into a base editor can comprise an APOBEC deaminase comprising a W285Y and a R320E mutation of hAPOBEC3G, or one or more corresponding mutations in another APOBEC deaminase. In some embodiments, an APOBEC deaminase incorporated into a base editor can comprise an APOBEC deaminase comprising a R320E and a R326E mutation of hAPOBEC3G, or one or more corresponding mutations in another APOBEC deaminase. In some embodiments, an APOBEC deaminase incorporated into a base editor can comprise an APOBEC deaminase comprising a W285Y and a R326E mutation of hAPOBEC3G, or one or more corresponding mutations in another APOBEC deaminase. In some embodiments, an APOBEC deaminase incorporated into a base editor can comprise an APOBEC deaminase comprising a W285Y, R320E, and R326E mutation of hAPOBEC3G, or one or more corresponding mutations in another APOBEC deaminase.

[0471] A number of modified cytidine deaminases are commercially available, including, but not limited to, SaBE3, SaKKH-BE3, VQR-BE3, EQR-BE3, VRER-BE3, YE1-BE3, EE-BE3, YE2-BE3, and YEE-BE3, which are available from Addgene (plasmids 85169, 85170, 85171, 85172, 85173, 85174, 85175, 85176, 85177). In some embodiments, a deaminase incorporated into a base editor comprises all or a portion of an APOBEC1 deaminase.

[0472] In some embodiments, the fusion proteins of the invention comprise one or more cytidine deaminase domains. In some embodiments, the cytidine deaminases provided herein are capable of deaminating cytosine or 5-methylcytosine to uracil or thymine. In some embodiments, the cytidine deaminases provided herein are capable of deaminating cytosine in DNA. The cytidine deaminase may be derived from any suitable organism. In some embodiments, the cytidine deaminase is a naturally-occurring cytidine deaminase that includes one or more mutations corresponding to any of the mutations provided herein. One of skill in the art will be able to identify the corresponding residue in any homologous protein, e.g., by sequence alignment and determination of homologous residues. Accordingly, one of skill in the art would be able to generate mutations in any naturally-occurring cytidine deaminase that corresponds to any of the mutations described herein. In some embodiments, the cytidine deaminase is from a prokaryote. In some embodiments, the cytidine deaminase is from a bacterium. In some embodiments, the cytidine deaminase is from a mammal (e.g., human).

[0473] In some embodiments, the cytidine deaminase comprises an amino acid sequence that is at least 60%, at least 65%, at least 70%, at least 75%, at least 80%, at least 85%, at least 90%, at least 95%, at least 96%, at least 97%, at least 98%, at least 99%, or at least 99.5% identical to any one of the cytidine deaminase amino acid sequences set forth herein. It should be appreciated that cytidine deaminases provided herein may include one or more mutations (e.g., any of the mutations provided herein). Some embodiments provide a polynucleotide molecule encoding the cytidine deaminase nucleobase editor polypeptide of any previous aspect or as delineated herein. In some embodiments, the polynucleotide is codon optimized.

[0474] The disclosure provides any deaminase domains with a certain percent identity plus any of the mutations or combinations thereof described herein. In some embodiments, the cytidine deaminase comprises an amino acid sequence that has 1, 2, 3, 4, 5, 6, 7, 8, 9, 10, 11, 12, 13, 14, 15, 16, 17, 18, 19, 20, 21, 22, 21, 24, 25, 26, 27, 28, 29, 30, 31, 32, 33, 34, 35, 36, 37, 38, 39, 40, 41, 42, 43, 44, 45, 46, 47, 48, 49, 50, or more mutations compared to a reference sequence, or any of the cytidine deaminases provided herein. In some embodiments, the cytidine deaminase comprises an amino acid sequence that has at least 5, at least 10, at least 15, at least 20, at least 25, at least 30, at least 35, at least 40, at least 45, at least 50, at least 60, at least 70, at least 80, at least 90, at least 100, at least 110, at least 120, at least 130, at least 140, at least 150, at least 160, or at least 170 identical contiguous amino acid residues as compared to any one of the amino acid sequences known in the art or described herein.

[0475] A fusion protein of the invention second protein comprises two or more nucleic acid editing domains.

[0476] Details of C to T nucleobase editing proteins are described in International PCT Application No. PCT/US2016/058344 (WO2017/070632) and Komor, A. C., et al., “Programmable editing of a target base in genomic DNA without double-stranded DNA cleavage” Nature 533, 420-424 (2016), the entire contents of which are hereby incorporated by reference.

### Guide Polynucleotides

[0477] A polynucleotide programmable nucleotide binding domain, when in conjunction with a bound guide polynucleotide (e.g., gRNA), can specifically bind to a target polynucleotide sequence (i.e., via complementary base pairing between bases of the bound guide nucleic acid and bases of the target polynucleotide sequence) and thereby localize the base editor to the target nucleic acid sequence desired to be edited. In some embodiments, the target polynucleotide sequence comprises single-stranded DNA or double-stranded DNA. In some embodiments, the target polynucleotide sequence comprises RNA. In some embodiments, the target polynucleotide sequence comprises a DNA-RNA hybrid.

[0478] CRISPR is an adaptive immune system that provides protection against mobile genetic elements (viruses, transposable elements and conjugative plasmids). CRISPR clusters contain spacers, sequences complementary to antecedent mobile elements, and target invading nucleic acids. CRISPR clusters are transcribed and processed into CRISPR RNA (crRNA). In type II CRISPR systems, correct processing of pre-crRNA requires a trans-encoded small RNA (tracrRNA), endogenous ribonuclease 3 (rnc) and a Cas9 protein. The tracrRNA serves as a guide for ribonuclease 3-aided processing of pre-crRNA. Subsequently, Cas9/crRNA/tracrRNA endonucleolytically cleaves linear or circular dsDNA target complementary to the spacer. The target strand not complementary to crRNA is first cut endonucleolytically, and then trimmed 3′-5′ exonucleolytically. In nature, DNA-binding and cleavage typically requires protein and both RNAs. However, single guide RNAs (“sgRNA”, or simply “gRNA”) can be engineered so as to incorporate aspects of both the crRNA and tracrRNA into a single RNA species. See, e.g., Jinek M., et al. Science 337:816-821(2012), the entire contents of which is hereby incorporated by reference. Cas9 recognizes a short motif in the CRISPR repeat sequences (the PAM or protospacer adjacent motif) to help distinguish self versus non-self. See e.g., “Complete genome sequence of an M1 strain of Streptococcus pyogenes.” Ferretti, J. J. et al., Natl. Acad. Sci. U.S.A. 98:4658-4663(2001); “CRISPR RNA maturation by trans-encoded small RNA and host factor RNase III.” Deltcheva E. et al., Nature 471:602-607(2011); and “Programmable dual-RNA-guided DNA endonuclease in adaptive bacterial immunity.” Jinek M. et al, Science 337:816-821(2012), the entire contents of each of which are incorporated herein by reference).

[0479] The PAM sequence can be any PAM sequence known in the art. Suitable PAM sequences include, but are not limited to, NGG, NGA, NGC, NGN, NGT, NGCG, NGAG, NGAN, NGNG, NGCN, NGCG, NGTN, NNGRRT, NNNRRT, NNGRR(N), TTTV, TYCV, TYCV, TATV, NNNNGATT, NNAGAAW, or NAAAAC. Y is a pyrimidine; N is any nucleotide base; W is A or T.

[0480] In an embodiment, a guide polynucleotide described herein can be RNA or DNA. In one embodiment, the guide polynucleotide is a gRNA. An RNA/Cas complex can assist in “guiding” a Cas protein to a target DNA. Cas9/crRNA/tracrRNA endonucleolytically cleaves linear or circular dsDNA target complementary to the spacer. The target strand not complementary to crRNA is first cut endonucleolytically, then trimmed 3′-5′ exonucleolytically. In nature, DNA-binding and cleavage typically requires protein and both RNAs. However, single guide RNAs (“sgRNA”, or simply “gRNA”) can be engineered so as to incorporate aspects of both the crRNA and tracrRNA into a single RNA species. See, e.g., Jinek M. et al., Science 337:816-821(2012), the entire contents of which is hereby incorporated by reference.

[0481] In some embodiments, the guide polynucleotide is at least one single guide RNA (“sgRNA” or “gRNA”). In some embodiments, a guide polynucleotide comprises two or more individual polynucleotides, which can interact with one another via for example complementary base pairing (e.g., a dual guide polynucleotide, dual gRNA). For example, a guide polynucleotide can comprise a CRISPR RNA (crRNA) and a trans-activating CRISPR RNA (tracrRNA) or can comprise one or more trans-activating CRISPR RNA (tracrRNA).

[0482] In some embodiments, the guide polynucleotide is at least one tracrRNA. In some embodiments, the guide polynucleotide does not require PAM sequence to guide the polynucleotide-programmable DNA-binding domain (e.g., Cas9 or Cpf1) to the target nucleotide sequence.

[0483] A guide polynucleotide may include natural or non-natural (or unnatural) nucleotides (e.g., peptide nucleic acid or nucleotide analogs). In some cases, the targeting region of a guide nucleic acid sequence can be at least 15, 16, 17, 18, 19, 20, 21, 22, 23, 24, 25, 26, 27, 28, 29, or 30 nucleotides in length. A targeting region of a guide nucleic acid can be between 10-30 nucleotides in length, or between 15-25 nucleotides in length, or between 15-20 nucleotides in length.

[0484] In some embodiments, the base editor provided herein utilizes one or more guide polynucleotide (e.g., multiple gRNA). In some embodiments, a single guide polynucleotide is utilized for different base editors described herein. For example, a single guide polynucleotide can be utilized for a cytidine base editor and an adenosine base editor.

[0485] In some embodiments, the methods described herein can utilize an engineered Cas protein. A guide RNA (gRNA) is a short synthetic RNA composed of a scaffold sequence necessary for Cas-binding and a user-defined ˜20 nucleotide spacer that defines the genomic target to be modified. Exemplary gRNA scaffold sequences are provided in the sequence listing as SEQ ID NOs: 317-327. Thus, a skilled artisan can change the genomic target of the Cas protein specificity is partially determined by how specific the gRNA targeting sequence is for the genomic target compared to the rest of the genome.

[0486] In some embodiments, the gRNA scaffold sequence is as follows:

(SEQ ID NO: 317)
GUUUUAGAGCUAGAAAUAGCAAGUUAAAAUAAGGCUAGUCCGUUAUCAAC
UUGAAAAAGUGGCACCGAGUCGGUGCUUUU.

[0487] In an embodiment, the RNA scaffold comprises a stem loop. In an embodiment, the RNA scaffold comprises the nucleic acid sequence:

(SEQ ID NO: 318)
GUUUUUGUACUCUCAAGAUUUAAGUAACUGUACAACGAAACUUACACAGU
UACUUAAAUCUUGCAGAAGCUACAAAGAUAAGGCUUCAUGCCGAAAUCAA
CACCCUGUCAUUUUAUGGCAGGGUG.

[0488] In an embodiment, an S. pyogenes sgRNA scaffold polynucleotide sequence is as follows:

(SEQ ID NO: 319)
GUUUUAGAGCUAGAAAUAGCAAGUUAAAAUAAGGCUAGUCCGUUAUCAAC
UUGAAAAAGUGGCACCGAGUCGGUGC.

[0489] In an embodiment, a BhCas12b gRNA scaffold polynucleotide sequence is as follows:

(SEQ ID NO: 320)
GUUUUAGUACUCUGUAAUGAAAAUUACAGAAUCUACUAAAACAAGGCAAA
AUGCCGUGUUUAUCUCGUCAACUUGUUGGCGAGA.

[0490] In an embodiment, a BvCas12b gRNA scaffold polynucleotide sequence is as follows:

(SEQ ID NO: 321)
GUUCUGUCUUUUGGUCAGGACAACCGUCUAGCUAUAAGUGCUGCAGGGUG
UGAGAAACUCCUAUUGCUGGACGAUGUCUCUUACGAGGCAUUAGCAC.

(SEQ ID NO: 322)
GACCUAUAGGGUCAAUGAAUCUGUGCGUGUGCCAUAAGUAAUUAAAAAUU
ACCCACCACAGGAGCACCUGAAAACAGGUGCUUGGCAC.

[0491] In an embodiment, the RNA scaffold comprises the nucleic acid sequence:

(SEQ ID NO: 323)
GUUUUAGAGCUAGAAAUAGCAAGUUAAAAUAAGGCUAGUCCGUUAUCAAC
UUGAAAAAGUGGGACCGAGUCGGUGCU*mU* mU*mU

where m=2′-O-methyl modification and *=3′ phosphorothioate internucleotide linkages (i.e., at the first 3′ terminal RNA residues as shown here).

[0492] In an embodiment, the RNA scaffold comprises a canonical stem loop. In an embodiment, the RNA scaffold comprises the nucleic acid sequence:

(SEQ ID NO: 324)
GUUUUAGAGCUAGAAAUAGCAAGUUAAAAUAAGGCUAGUCCGUUAUCAAC
UUGAAAAAGUGGCACCGAGUCGGUGCU*mU*mU*mU

where m=2′-O-methyl modification and *=3′ phosphorothioate internucleotide linkages (i.e., at the first 3′ terminal RNA residues as shown here).

[0493] In other embodiments, a guide polynucleotide can comprise both the polynucleotide targeting portion of the nucleic acid and the scaffold portion of the nucleic acid in a single molecule (i.e., a single-molecule guide nucleic acid). For example, a single-molecule guide polynucleotide can be a single guide RNA (sgRNA or gRNA). Herein the term guide polynucleotide sequence contemplates any single, dual or multi-molecule nucleic acid capable of interacting with and directing a base editor to a target polynucleotide sequence.

[0494] Typically, a guide polynucleotide (e.g., crRNA/trRNA complex or a gRNA) comprises a “polynucleotide-targeting segment” that includes a sequence capable of recognizing and binding to a target polynucleotide sequence, and a “protein-binding segment” that stabilizes the guide polynucleotide within a polynucleotide programmable nucleotide binding domain component of a base editor. In some embodiments, the polynucleotide targeting segment of the guide polynucleotide recognizes and binds to a DNA polynucleotide, thereby facilitating the editing of a base in DNA. In other cases, the polynucleotide targeting segment of the guide polynucleotide recognizes and binds to an RNA polynucleotide, thereby facilitating the editing of a base in RNA. Herein a “segment” refers to a section or region of a molecule, e.g., a contiguous stretch of nucleotides in the guide polynucleotide. A segment can also refer to a region/section of a complex such that a segment can comprise regions of more than one molecule. For example, where a guide polynucleotide comprises multiple nucleic acid molecules, the protein-binding segment of can include all or a portion of multiple separate molecules that are for instance hybridized along a region of complementarity. In some embodiments, a protein-binding segment of a DNA-targeting RNA that comprises two separate molecules can comprise (i) base pairs 40-75 of a first RNA molecule that is 100 base pairs in length; and (ii) base pairs 10-25 of a second RNA molecule that is 50 base pairs in length. The definition of “segment,” unless otherwise specifically defined in a particular context, is not limited to a specific number of total base pairs, is not limited to any particular number of base pairs from a given RNA molecule, is not limited to a particular number of separate molecules within a complex, and can include regions of RNA molecules that are of any total length and can include regions with complementarity to other molecules.

[0495] The guide polynucleotides can be synthesized chemically, synthesized enzymatically, or a combination thereof. For example, the gRNA can be synthesized using standard phosphoramidite-based solid-phase synthesis methods. Alternatively, the gRNA can be synthesized in vitro by operably linking DNA encoding the gRNA to a promoter control sequence that is recognized by a phage RNA polymerase. Examples of suitable phage promoter sequences include T7, T3, SP6 promoter sequences, or variations thereof. In embodiments in which the gRNA comprises two separate molecules (e.g., crRNA and tracrRNA), the crRNA can be chemically synthesized and the tracrRNA can be enzymatically synthesized.

[0496] A guide polynucleotide may be expressed, for example, by a DNA that encodes the gRNA, e.g., a DNA vector comprising a sequence encoding the gRNA. The gRNA may be encoded alone or together with an encoded base editor. Such DNA sequences may be introduced into an expression system, e.g., a cell, together or separately. For example, DNA sequences encoding a polynucleotide programmable nucleotide binding domain and a gRNA may be introduced into a cell, each DNA sequence can be part of a separate molecule (e.g., one vector containing the polynucleotide programmable nucleotide binding domain coding sequence and a second vector containing the gRNA coding sequence) or both can be part of a same molecule (e.g., one vector containing coding (and regulatory) sequence for both the polynucleotide programmable nucleotide binding domain and the gRNA). An RNA can be transcribed from a synthetic DNA molecule, e.g., a gBlocks® gene fragment. A gRNA molecule can be transcribed in vitro.

[0497] A gRNA or a guide polynucleotide can comprise three regions: a first region at the 5′ end that can be complementary to a target site in a chromosomal sequence, a second internal region that can form a stem loop structure, and a third 3′ region that can be single-stranded. A first region of each gRNA can also be different such that each gRNA guides a fusion protein to a specific target site. Further, second and third regions of each gRNA can be identical in all gRNAs.

[0498] A first region of a gRNA or a guide polynucleotide can be complementary to sequence at a target site in a chromosomal sequence such that the first region of the gRNA can base pair with the target site. In some cases, a first region of a gRNA can comprise from or from about 10 nucleotides to 25 nucleotides (i.e., from 10 nucleotides to nucleotides; or from about 10 nucleotides to about 25 nucleotides; or from 10 nucleotides to about 25 nucleotides; or from about 10 nucleotides to 25 nucleotides) or more. For example, a region of base pairing between a first region of a gRNA and a target site in a chromosomal sequence can be or can be about 10, 11, 12, 13, 14, 15, 16, 17, 18, 19, 20, 22, 23, 24, 25, or more nucleotides in length. Sometimes, a first region of a gRNA can be or can be about 19, 20, or 21 nucleotides in length.

[0499] A gRNA or a guide polynucleotide can also comprise a second region that forms a secondary structure. For example, a secondary structure formed by a gRNA can comprise a stem (or hairpin) and a loop. A length of a loop and a stem can vary. For example, a loop can range from or from about 3 to 10 nucleotides in length, and a stem can range from or from about 6 to 20 base pairs in length. A stem can comprise one or more bulges of 1 to 10 or about 10 nucleotides. The overall length of a second region can range from or from about 16 to 60 nucleotides in length. For example, a loop can be or can be about 4 nucleotides in length and a stem can be or can be about 12 base pairs.

[0500] A gRNA or a guide polynucleotide can also comprise a third region at the 3′ end that can be essentially single-stranded. For example, a third region is sometimes not complementarity to any chromosomal sequence in a cell of interest and is sometimes not complementarity to the rest of a gRNA. Further, the length of a third region can vary. A third region can be more than or more than about 4 nucleotides in length. For example, the length of a third region can range from or from about 5 to 60 nucleotides in length.

[0501] A gRNA or a guide polynucleotide can target any exon or intron of a gene target. In some cases, a guide can target exon 1 or 2 of a gene, in other cases; a guide can target exon 3 or 4 of a gene. In some embodiments, a composition comprises multiple gRNAs that all target the same exon or multiple gRNAs that target different exons. An exon and/or an intron of a gene can be targeted.

[0502] A gRNA or a guide polynucleotide can target a nucleic acid sequence of about 20 nucleotides or less than about 20 nucleotides (e.g., at least about 5, 10, 15, 16, 17, 18, 19, 20, 21, 22, 23, 24, 25, 30 nucleotides), or anywhere between about 1-100 nucleotides (e.g., 5, 10, 15, 16, 17, 18, 19, 20, 21, 22, 23, 24, 25, 30, 40, 50, 60, 70, 80, 90, 100). A target nucleic acid sequence can be or can be about 20 bases immediately 5′ of the first nucleotide of the PAM. A gRNA can target a nucleic acid sequence. A target nucleic acid can be at least or at least about 1-10, 1-20, 1-30, 1-40, 1-50, 1-60, 1-70, 1-80, 1-90, or 1-100 nucleotides.

[0503] Methods for selecting, designing, and validating guide polynucleotides, e.g., gRNAs and targeting sequences are described herein and known to those skilled in the art. For example, to minimize the impact of potential substrate promiscuity of a deaminase domain in the nucleobase editor system (e.g., an AID domain), the number of residues that could unintentionally be targeted for deamination (e.g., off-target C residues that could potentially reside on single strand DNA within the target nucleic acid locus) may be minimized. In addition, software tools can be used to optimize the gRNAs corresponding to a target nucleic acid sequence, e.g., to minimize total off-target activity across the genome. For example, for each possible targeting domain choice using S. pyogenes Cas9, all off-target sequences (preceding selected PAMs, e.g., NAG or NGG) may be identified across the genome that contain up to certain number (e.g., 1, 2, 3, 4, 5, 6, 7, 8, 9, or 10) of mismatched base-pairs. First regions of gRNAs complementary to a target site can be identified, and all first regions (e.g., crRNAs) can be ranked according to its total predicted off-target score; the top-ranked targeting domains represent those that are likely to have the greatest on-target and the least off-target activity. Candidate targeting gRNAs can be functionally evaluated by using methods known in the art and/or as set forth herein.

[0504] As a non-limiting example, target DNA hybridizing sequences in crRNAs of a gRNA for use with Cas9s may be identified using a DNA sequence searching algorithm. gRNA design is carried out using custom gRNA design software based on the public tool cas-OFFinder as described in Bae S., Park J., & Kim J.-S. Cas-OFFinder: A fast and versatile algorithm that searches for potential off-target sites of Cas9 RNA-guided endonucleases. Bioinformatics 30, 1473-1475 (2014). This software scores guides after calculating their genome-wide off-target propensity. Typically matches ranging from perfect matches to 7 mismatches are considered for guides ranging in length from 17 to 24. Once the off-target sites are computationally-determined, an aggregate score is calculated for each guide and summarized in a tabular output using a web-interface. In addition to identifying potential target sites adjacent to PAM sequences, the software also identifies all PAM adjacent sequences that differ by 1, 2, 3 or more than 3 nucleotides from the selected target sites. Genomic DNA sequences for a target nucleic acid sequence, e.g., a target gene may be obtained and repeat elements may be screened using publicly available tools, for example, the RepeatMasker program. RepeatMasker searches input DNA sequences for repeated elements and regions of low complexity. The output is a detailed annotation of the repeats present in a given query sequence.

[0505] Following identification, first regions of gRNAs, e.g., crRNAs, are ranked into tiers based on their distance to the target site, their orthogonality and presence of 5′ nucleotides for close matches with relevant PAM sequences (for example, a 5′ G based on identification of close matches in the human genome containing a relevant PAM e.g., NGG PAM for S. pyogenes, NNGRRT or NNGRRV PAM for S. aureus). As used herein, orthogonality refers to the number of sequences in the human genome that contain a minimum number of mismatches to the target sequence. A “high level of orthogonality” or “good orthogonality” may, for example, refer to 20-mer targeting domains that have no identical sequences in the human genome besides the intended target, nor any sequences that contain one or two mismatches in the target sequence. Targeting domains with good orthogonality may be selected to minimize off-target DNA cleavage.

[0506] A gRNA can then be introduced into a cell or embryo as an RNA molecule or a non-RNA nucleic acid molecule, e.g., DNA molecule. In one embodiment, a DNA encoding a gRNA is operably linked to promoter control sequence for expression of the gRNA in a cell or embryo of interest. A RNA coding sequence can be operably linked to a promoter sequence that is recognized by RNA polymerase III (Pol III). Plasmid vectors that can be used to express gRNA include, but are not limited to, px330 vectors and px333 vectors. In some cases, a plasmid vector (e.g., px333 vector) can comprise at least two gRNA-encoding DNA sequences. Further, a vector can comprise additional expression control sequences (e.g., enhancer sequences, Kozak sequences, polyadenylation sequences, transcriptional termination sequences, etc.), selectable marker sequences (e.g., GFP or antibiotic resistance genes such as puromycin), origins of replication, and the like. A DNA molecule encoding a gRNA can also be linear. A DNA molecule encoding a gRNA or a guide polynucleotide can also be circular.

[0507] In some embodiments, a reporter system is used for detecting base-editing activity and testing candidate guide polynucleotides. In some embodiments, a reporter system comprises a reporter gene based assay where base editing activity leads to expression of the reporter gene. For example, a reporter system may include a reporter gene comprising a deactivated start codon, e.g., a mutation on the template strand from 3′-TAC-5′ to 3′-CAC-5′. Upon successful deamination of the target C, the corresponding mRNA will be transcribed as 5′-AUG-3′ instead of 5′-GUG-3′, enabling the translation of the reporter gene. Suitable reporter genes will be apparent to those of skill in the art. Non-limiting examples of reporter genes include gene encoding green fluorescence protein (GFP), red fluorescence protein (RFP), luciferase, secreted alkaline phosphatase (SEAP), or any other gene whose expression are detectable and apparent to those skilled in the art. The reporter system can be used to test many different gRNAs, e.g., in order to determine which residue(s) with respect to the target DNA sequence the respective deaminase will target. sgRNAs that target non-template strand can also be tested in order to assess off-target effects of a specific base editing protein, e.g., a Cas9 deaminase fusion protein. In some embodiments, such gRNAs can be designed such that the mutated start codon will not be base-paired with the gRNA. The guide polynucleotides can comprise standard ribonucleotides, modified ribonucleotides (e.g., pseudouridine), ribonucleotide isomers, and/or ribonucleotide analogs. In some embodiments, the guide polynucleotide can comprise at least one detectable label. The detectable label can be a fluorophore (e.g., FAM, TMR, Cy3, Cy5, Texas Red, Oregon Green, Alexa Fluors, Halo tags, or suitable fluorescent dye), a detection tag (e.g., biotin, digoxigenin, and the like), quantum dots, or gold particles.

[0508] In some embodiments, a base editor system may comprise multiple guide polynucleotides, e.g., gRNAs. For example, the gRNAs may target to one or more target loci (e.g., at least 1 gRNA, at least 2 gRNA, at least 5 gRNA, at least 10 gRNA, at least 20 gRNA, at least 30 g RNA, at least 50 gRNA) comprised in a base editor system. The multiple gRNA sequences can be tandemly arranged and are preferably separated by a direct repeat.

### Modified Nucleotides

[0509] To enhance expression, stability, and/or genomic/base editing efficiency, and/or reduce possible toxicity, the base editor-coding sequence (e.g., mRNA) and/or the guide polynucleotide (e.g., gRNA) can be modified to include one or more modified nucleotides and/or chemical modifications, e.g. using pseudo-uridine, 5-Methyl-cytosine, 2′-O-methyl-3′-phosphonoacetate, 2′-O-methyl thioPACE (MSP), 2′-O-methyl-PACE (MP), 2′-fluoro RNA (2′-F-RNA), =constrained ethyl (S-cEt), 2′-O-methyl (‘M’), 2′-O-methyl-3′-phosphorothioate (‘MS’), 2′-O-methyl-3′-thiophosphonoacetate (‘MSP’), 5-methoxyuridine, phosphorothioate, and N1-Methylpseudouridine. Chemically protected gRNAs can enhance stability and editing efficiency in vivo and ex vivo. Methods for using chemically modified mRNAs and guide RNAs are known in the art and described, for example, by Jiang et al., Chemical modifications of adenine base editor mRNA and guide RNA expand its application scope. Nat Commun 11, 1979 (2020). doi.org/10.1038/s41467-020-15892-8, Callum et al., N1-Methylpseudouridine substitution enhances the performance of synthetic mRNA switches in cells, Nucleic Acids Research, Volume 48, Issue 6, 6 Apr. 2020, Page e35, and Andries et al., Journal of Controlled Release, Volume 217, 10 Nov. 2015, Pages 337-344, each of which is incorporated herein by reference in its entirety.

[0510] In a particular embodiment, the chemical modifications are 2′-O-methyl (2′-OMe) modifications. The modified guide RNAs may improve saCas9 efficacy and also specificity. The effect of an individual modification varies based on the position and combination of chemical modifications used as well as the inter- and intramolecular interactions with other modified nucleotides. By way of example, S-cEt has been used to improve oligonucleotide intramolecular folding.

[0511] In some embodiments, the guide polynucleotide comprises one or more modified nucleotides at the 5′ end and/or the 3′ end of the guide. In some embodiments, the guide polynucleotide comprises two, three, four or more modified nucleosides at the 5′ end and/or the 3′ end of the guide. In some embodiments, the guide polynucleotide comprises two, three, four or more modified nucleosides at the 5′ end and/or the 3′ end of the guide. In some embodiments, the guide polynucleotide comprises four modified nucleosides at the 5′ end and four modified nucleosides at the 3′ end of the guide. In some embodiments, the modified nucleoside comprises a 2′ O-methyl or a phosphorothioate.

[0512] In some embodiments, the guide comprises at least about 50%-75% modified nucleotides. In some embodiments, the guide comprises at least about 85% or more modified nucleotides. In some embodiments, at least about 1-5 nucleotides at the 5′ end of the gRNA are modified and at least about 1-5 nucleotides at the 3′ end of the gRNA are modified. In some embodiments, at least about 3-5 contiguous nucleotides at each of the 5′ and 3′ termini of the gRNA are modified. In some embodiments, at least about 20% of the nucleotides present in a direct repeat or anti-direct repeat are modified. In some embodiments, at least about 50% of the nucleotides present in a direct repeat or anti-direct repeat are modified. In some embodiments, at least about 50-75% of the nucleotides present in a direct repeat or anti-direct repeat are modified. In some embodiments, at least about 100 of the nucleotides present in a direct repeat or anti-direct repeat are modified. In some embodiments, at least about 20% or more of the nucleotides present in a hairpin present in the gRNA scaffold are modified. In some embodiments, at least about 50% or more of the nucleotides present in a hairpin present in the gRNA scaffold are modified. In some embodiments, the guide comprises a variable length spacer. In some embodiments, the guide comprises a 20-40 nucleotide spacer. In some embodiments, the guide comprises a spacer comprising at least about 20-25 nucleotides or at least about 30-35 nucleotides. In some embodiments, the spacer comprises modified nucleotides. In some embodiments, the guide comprises two or more of the following:
[0513] at least about 1-5 nucleotides at the 5′ end of the gRNA are modified and at least about 1-5 nucleotides at the 3′ end of the gRNA are modified;
[0514] at least about 20% of the nucleotides present in a direct repeat or anti-direct repeat are modified;
[0515] at least about 50-75% of the nucleotides present in a direct repeat or anti-direct repeat are modified;
[0516] at least about 20% or more of the nucleotides present in a hairpin present in the gRNA scaffold are modified;
[0517] a variable length spacer; and
[0518] a spacer comprising modified nucleotides.

[0519] In embodiments, the gRNA contains numerous modified nucleotides and/or chemical modifications (“heavy mods”). Such heavy mods can increase base editing ˜2 fold in vivo or in vitro. For such modifications, mN=2′-OMe; Ns=phosphorothioate (PS), where “N” represents the any nucleotide, as would be understood by one having skill in the art. In some cases, a nucleotide (N) may contain two modifications, for example, both a 2′-OMe and a PS modification. For example, a nucleotide with a phosphorothioate and 2′ OMe is denoted as “mNs;” when there are two modifications next to each other, the notation is “mNsmNs.

[0520] In some embodiments of the modified gRNA, the gRNA comprises one or more chemical modifications selected from the group consisting of 2′-O-methyl (2′-OMe), phosphorothioate (PS), 2′-O-methyl thioPACE (MSP), 2′-O-methyl-PACE (MP), 2′-O-methyl thioPACE (MSP), 2-fluoro RNA (2′-F-RNA), and constrained ethyl (S-cEt). In embodiments, the gRNA comprises 2′-O-methyl or phosphorothioate modifications. In an embodiment, the gRNA comprises 2′-O-methyl and phosphorothioate modifications. In an embodiment, the modifications increase base editing by at least about 2 fold.

[0521] A guide polynucleotide can comprise one or more modifications to provide a nucleic acid with a new or enhanced feature. A guide polynucleotide can comprise a nucleic acid affinity tag. A guide polynucleotide can comprise synthetic nucleotide, synthetic nucleotide analog, nucleotide derivatives, and/or modified nucleotides.

[0522] In some cases, a gRNA or a guide polynucleotide can comprise modifications. A modification can be made at any location of a gRNA or a guide polynucleotide. More than one modification can be made to a single gRNA or a guide polynucleotide. A gRNA or a guide polynucleotide can undergo quality control after a modification. In some cases, quality control can include PAGE, HPLC, MS, or any combination thereof.

[0523] A modification of a gRNA or a guide polynucleotide can be a substitution, insertion, deletion, chemical modification, physical modification, stabilization, purification, or any combination thereof.

[0524] A gRNA or a guide polynucleotide can also be modified by 5′ adenylate, 5′ guanosine-triphosphate cap, 5′ N7-Methylguanosine-triphosphate cap, 5′ triphosphate cap, 3′ phosphate, 3′ thiophosphate, 5′ phosphate, 5′ thiophosphate, Cis-Syn thymidine dimer, trimers, C12 spacer, C3 spacer, C6 spacer, dSpacer, PC spacer, rSpacer, Spacer 18, Spacer 9, 3′-3′ modifications, 2′-O-methyl thioPACE (MSP), 2′-O-methyl-PACE (MP), and constrained ethyl (S-cEt), 5′-5′ modifications, abasic, acridine, azobenzene, biotin, biotin BB, biotin TEG, cholesteryl TEG, desthiobiotin TEG, DNP TEG, DNP-X, DOTA, dT-Biotin, dual biotin, PC biotin, psoralen C2, psoralen C6, TINA, 3′ DABCYL, black hole quencher 1, black hole quencher 2, DABCYL SE, dT-DABCYL, IRDye QC-1, QSY-21, QSY-35, QSY-7, QSY-9, carboxyl linker, thiol linkers, 2′-deoxyribonucleoside analog purine, 2′-deoxyribonucleoside analog pyrimidine, ribonucleoside analog, 2′-O-methyl ribonucleoside analog, sugar modified analogs, wobble/universal bases, fluorescent dye label, 2′-fluoro RNA, 2′-O-methyl RNA, methylphosphonate, phosphodiester DNA, phosphodiester RNA, phosphothioate DNA, phosphorothioate RNA, UNA, pseudouridine-5′-triphosphate, 5′-methylcytidine-5′-triphosphate, or any combination thereof.

[0525] In some cases, a modification is permanent. In other cases, a modification is transient. In some cases, multiple modifications are made to a gRNA or a guide polynucleotide. A gRNA or a guide polynucleotide modification can alter physiochemical properties of a nucleotide, such as their conformation, polarity, hydrophobicity, chemical reactivity, base-pairing interactions, or any combination thereof.

[0526] A guide polynucleotide can be transferred into a cell by transfecting the cell with an isolated gRNA or a plasmid DNA comprising a sequence coding for the guide RNA and a promoter. A gRNA or a guide polynucleotide can also be transferred into a cell in other way, such as using virus-mediated gene delivery. A gRNA or a guide polynucleotide can be isolated. For example, a gRNA can be transfected in the form of an isolated RNA into a cell or organism. A gRNA can be prepared by in vitro transcription using any in vitro transcription system known in the art. A gRNA can be transferred to a cell in the form of isolated RNA rather than in the form of plasmid comprising encoding sequence for a gRNA.

[0527] A modification can also be a phosphorothioate substitute. In some cases, a natural phosphodiester bond can be susceptible to rapid degradation by cellular nucleases and; a modification of internucleotide linkage using phosphorothioate (PS) bond substitutes can be more stable towards hydrolysis by cellular degradation. A modification can increase stability in a gRNA or a guide polynucleotide. A modification can also enhance biological activity. In some cases, a phosphorothioate enhanced RNA gRNA can inhibit RNase A, RNase T1, calf serum nucleases, or any combinations thereof. These properties can allow the use of PS-RNA gRNAs to be used in applications where exposure to nucleases is of high probability in vivo or in vitro. For example, phosphorothioate (PS) bonds can be introduced between the last 3-5 nucleotides at the 5′- or 3′-end of a gRNA which can inhibit exonuclease degradation. In some cases, phosphorothioate bonds can be added throughout an entire gRNA to reduce attack by endonucleases.

[0528] In some embodiments, the guide RNA is designed to disrupt a splice site (i.e., a splice acceptor (SA) or a splice donor (SD). In some embodiments, the guide RNA is designed such that the base editing results in a premature STOP codon.

### Protospacer Adjacent Motif

[0529] The term “protospacer adjacent motif (PAM)” or PAM-like motif refers to a 2-6 base pair DNA sequence immediately following the DNA sequence targeted by the Cas9 nuclease in the CRISPR bacterial adaptive immune system. In some embodiments, the PAM can be a 5′ PAM (i.e., located upstream of the 5′ end of the protospacer). In other embodiments, the PAM can be a 3′ PAM (i.e., located downstream of the 5′ end of the protospacer). The PAM sequence is essential for target binding, but the exact sequence depends on a type of Cas protein. The PAM sequence can be any PAM sequence known in the art. Suitable PAM sequences include, but are not limited to, NGG, NGA, NGC, NGN, NGT, NGTT, NGCG, NGAG, NGAN, NGNG, NGCN, NGCG, NGTN, NNGRRT, NNNRRT, NNGRR(N), TTTV, TYCV, TYCV, TATV, NNNNGATT, NNAGAAW, or NAAAAC. Y is a pyrimidine; N is any nucleotide base; W is A or T.

[0530] A base editor provided herein can comprise a CRISPR protein-derived domain that is capable of binding a nucleotide sequence that contains a canonical or non-canonical protospacer adjacent motif (PAM) sequence. A PAM site is a nucleotide sequence in proximity to a target polynucleotide sequence. Some aspects of the disclosure provide for base editors comprising all or a portion of CRISPR proteins that have different PAM specificities.

[0531] For example, typically Cas9 proteins, such as Cas9 from S. pyogenes (spCas9), require a canonical NGG PAM sequence to bind a particular nucleic acid region, where the “N” in “NGG” is adenine (A), thymine (T), guanine (G), or cytosine (C), and the G is guanine. A PAM can be CRISPR protein-specific and can be different between different base editors comprising different CRISPR protein-derived domains. A PAM can be 5′ or 3′ of a target sequence. A PAM can be upstream or downstream of a target sequence. A PAM can be 1, 2, 3, 4, 5, 6, 7, 8, 9, 10 or more nucleotides in length. Often, a PAM is between 2-6 nucleotides in length.

[0532] In some embodiments, the PAM is an “NRN” PAM where the “N” in “NRN” is adenine (A), thymine (T), guanine (G), or cytosine (C), and the R is adenine (A) or guanine (G); or the PAM is an “NYN” PAM, wherein the “N” in NYN is adenine (A), thymine (T), guanine (G), or cytosine (C), and the Y is cytidine (C) or thymine (T), for example, as described in R.T. Walton et al., 2020, Science, 10.1126/science.aba8853 (2020), the entire contents of which are incorporated herein by reference.

[0533] Several PAM variants are described in Table 7 below.

TABLE 7
Cas9 proteins and corresponding
PAM sequences

| Variant | PAM |
|---|---|
| spCas9 | NGG |
| spCas9-VRQR | NGA |
| spCas9-VRER | NGCG |
| xCas9 (sp) | NGN |
| saCas9 | NNGRRT |
| saCas9-KKH | NNNRRT |
| spCas9-MQKSER | NGCG |
| spCas9-MQKSER | NGCN |
| spCas9-LRKIQK | NGTN |
| spCas9-LRVSQK | NGTN |
| spCas9-LRVSQL | NGTN |
| spCas9-MQKFRAER | NGC |
| Cpf1 | 5′ (TTTV) |
| SpyMac | 5′-NAA-3′ |

[0534] In some embodiments, the PAM is NGC. In some embodiments, the NGC PAM is recognized by a Cas9 variant. In some embodiments, the NGC PAM variant includes one or more amino acid substitutions selected from D1135M, S1136Q, G1218K, E1219F, A1322R, D1332A, R1335E, and T1337R (collectively termed “MQKFRAER”).

[0535] In some embodiments, the PAM is NGT. In some embodiments, the NGT PAM is recognized by a Cas9 variant. In some embodiments, the NGT PAM variant is generated through targeted mutations at one or more residues 1335, 1337, 1135, 1136, 1218, and/or 1219. In some embodiments, the NGT PAM variant is created through targeted mutations at one or more residues 1219, 1335, 1337, 1218. In some embodiments, the NGT PAM variant is created through targeted mutations at one or more residues 1135, 1136, 1218, 1219, and 1335. In some embodiments, the NGT PAM variant is selected from the set of targeted mutations provided in Tables 8A and 8B below.

TABLE 8A
NGT PAM Variant Mutations at residues
1219, 1335, 1337, 1218

| Variant | E1219V | R1335Q | T1337 | G1218 |
|---|---|---|---|---|
| 1 | F | V | T | |
| 2 | F | V | R | |
| 3 | F | V | Q | |
| 4 | F | V | L | |
| 5 | F | V | T | R |
| 6 | F | V | R | R |
| 7 | F | V | Q | R |
| 8 | F | V | L | R |
| 9 | L | L | T | |
| 10 | L | L | R | |
| 11 | L | L | Q | |
| 12 | L | L | L | |
| 13 | F | I | T | |
| 14 | F | I | R | |
| 15 | F | I | Q | |
| 16 | F | I | L | |
| 17 | F | G | C | |
| 18 | H | L | N | |
| 19 | F | G | C | A |
| 20 | H | L | N | V |
| 21 | L | A | W | |
| 22 | L | A | F | |
| 23 | L | A | Y | |
| 24 | I | A | W | |
| 25 | I | A | F | |
| 26 | I | A | Y | |

TABLE 8B
NGT PAM Variant Mutations at residues 1135,
1136, 1218, 1219, and 1335

| Variant | D1135L | S1136R | G1218S | E1219V | R1335Q |
|---|---|---|---|---|---|
| 27 | G | | | | |
| 28 | V | | | | |
| 29 | I | | | | |
| 30 | | A | | | |
| 31 | | W | | | |
| 32 | | H | | | |
| 33 | | K | | | |
| 34 | | | K | | |
| 35 | | | R | | |
| 36 | | | Q | | |
| 37 | | | T | | |
| 38 | | | N | | |
| 39 | | | | I | |
| 40 | | | | A | |
| 41 | | | | N | |
| 42 | | | | Q | |
| 43 | | | | G | |
| 44 | | | | L | |
| 45 | | | | S | |
| 46 | | | | T | |
| 47 | | | | | L |
| 48 | | | | | I |
| 49 | | | | | V |
| 50 | | | | | N |
| 51 | | | | | S |
| 52 | | | | | T |
| 53 | | | | | F |
| 54 | | | | | Y |
| 55 | N1286Q | I1331F | | | |

[0536] In some embodiments, the NGT PAM variant is selected from variant 5, 7, 28, 31, or 36 in Table 8A and Table 8B. In some embodiments, the variants have improved NGT PAM recognition.

[0537] In some embodiments, the NGT PAM variants have mutations at residues 1219, 1335, 1337, and/or 1218. In some embodiments, the NGT PAM variant is selected with mutations for improved recognition from the variants provided in Table 9 below.

TABLE 9
NGT PAM Variant Mutations at residues
1219, 1335, 1337, and 1218

| Variant | E1219V | R1335Q | T1337 | G1218 |
|---|---|---|---|---|
| 1 | F | V | T | |
| 2 | F | V | R | |
| 3 | F | V | Q | |
| 4 | F | V | L | |
| 5 | F | V | T | R |
| 6 | F | V | R | R |
| 7 | F | V | Q | R |
| 8 | F | V | L | R |

[0538] In some embodiments, the NGT PAM is selected from the variants provided in Table 10 below.

TABLE 10
NGT PAM variants

| | NGTN | D | S | G | E | A | R | T |
|---|---|---|---|---|---|---|---|---|
| | variant | 1135 | 1136 | 1218 | 1219 | 1322R | 1335 | 1337 |
| Vari- | LRKIQK | L | R | K | I | — | Q | K |
| ant 1 | | | | | | | | |
| Vari- | LRSVQK | L | R | S | V | — | Q | K |
| ant 2 | | | | | | | | |
| Vari- | LRSVQL | T | R | S | V | — | 0 | L |
| ant 3 | | | | | | | | |
| Vari- | LRKIRQK | L | R | K | I | R | Q | K |
| ant 4 | | | | | | | | |
| Vari- | LRSVRQK | L | R | S | V | R | Q | K |
| ant 5 | | | | | | | | |
| Vari- | LRSVRQL | L | R | S | V | R | Q | L |
| ant 6 | | | | | | | | |

[0539] In some embodiments the NGTN variant is variant 1. In some embodiments, the NGTN variant is variant 2. In some embodiments, the NGTN variant is variant 3. In some embodiments, the NGTN variant is variant 4. In some embodiments, the NGTN variant is variant 5. In some embodiments, the NGTN variant is variant 6.

[0540] In some embodiments, the Cas9 domain is a Cas9 domain from Streptococcus pyogenes (SpCas9). In some embodiments, the SpCas9 domain is a nuclease active SpCas9, a nuclease inactive SpCas9 (SpCas9d), or a SpCas9 nickase (SpCas9n). In some embodiments, the SpCas9 comprises a D9X mutation, or a corresponding mutation in any of the amino acid sequences provided herein, wherein X is any amino acid except for D. In some embodiments, the SpCas9 comprises a D9A mutation, or a corresponding mutation in any of the amino acid sequences provided herein. In some embodiments, the SpCas9 domain, the SpCas9d domain, or the SpCas9n domain can bind to a nucleic acid sequence having a non-canonical PAM. In some embodiments, the SpCas9 domain, the SpCas9d domain, or the SpCas9n domain can bind to a nucleic acid sequence having an NGG, a NGA, or a NGCG PAM sequence.

[0541] In some embodiments, the SpCas9 domain comprises one or more of a D1135X, a R1335X, and a T1337X mutation, or a corresponding mutation in any of the amino acid sequences provided herein, wherein X is any amino acid. In some embodiments, the SpCas9 domain comprises one or more of a D1135E, R1335Q, and T1337R mutation, or a corresponding mutation in any of the amino acid sequences provided herein. In some embodiments, the SpCas9 domain comprises a D1135E, a R1335Q, and a T1337R mutation, or corresponding mutations in any of the amino acid sequences provided herein. In some embodiments, the SpCas9 domain comprises one or more of a D1135X, a R1335X, and a T1337X mutation, or a corresponding mutation in any of the amino acid sequences provided herein, wherein X is any amino acid. In some embodiments, the SpCas9 domain comprises one or more of a D1135V, a R1335Q, and a T1337R mutation, or a corresponding mutation in any of the amino acid sequences provided herein. In some embodiments, the SpCas9 domain comprises a D1135V, a R1335Q, and a T1337R mutation, or corresponding mutations in any of the amino acid sequences provided herein. In some embodiments, the SpCas9 domain comprises one or more of a D1135X, a G1218X, a R1335X, and a T1337X mutation, or a corresponding mutation in any of the amino acid sequences provided herein, wherein X is any amino acid. In some embodiments, the SpCas9 domain comprises one or more of a D1135V, a G1218R, a R1335Q, and a T1337R mutation, or a corresponding mutation in any of the amino acid sequences provided herein. In some embodiments, the SpCas9 domain comprises a D1135V, a G1218R, a R1335Q, and a T1337R mutation, or corresponding mutations in any of the amino acid sequences provided herein.

[0542] In some examples, a PAM recognized by a CRISPR protein-derived domain of a base editor disclosed herein can be provided to a cell on a separate oligonucleotide to an insert (e.g., an AAV insert) encoding the base editor. In such embodiments, providing PAM on a separate oligonucleotide can allow cleavage of a target sequence that otherwise would not be able to be cleaved, because no adjacent PAM is present on the same polynucleotide as the target sequence.

[0543] In an embodiment, S. pyogenes Cas9 (SpCas9) can be used as a CRISPR endonuclease for genome engineering. However, others can be used. In some embodiments, a different endonuclease can be used to target certain genomic targets. In some embodiments, synthetic SpCas9-derived variants with non-NGG PAM sequences can be used. Additionally, other Cas9 orthologues from various species have been identified and these “non-SpCas9s” can bind a variety of PAM sequences that can also be useful for the present disclosure. For example, the relatively large size of SpCas9 (approximately 4 kb coding sequence) can lead to plasmids carrying the SpCas9 cDNA that cannot be efficiently expressed in a cell. Conversely, the coding sequence for Staphylococcus aureus Cas9 (SaCas9) is approximately 1 kilobase shorter than SpCas9, possibly allowing it to be efficiently expressed in a cell. Similar to SpCas9, the SaCas9 endonuclease is capable of modifying target genes in mammalian cells in vitro and in mice in vivo. In some embodiments, a Cas protein can target a different PAM sequence. In some embodiments, a target gene can be adjacent to a Cas9 PAM, 5′-NGG, for example. In other embodiments, other Cas9 orthologs can have different PAM requirements. For example, other PAMs such as those of S. thermophilus (5′-NNAGAA for CRISPRI and 5′-NGGNG for CRISPR3) and Neisseria meningitidis (5′-NNNNGATT) can also be found adjacent to a target gene.

[0544] In some embodiments, for a S. pyogenes system, a target gene sequence can precede (i.e., be 5′ to) a 5′-NGG PAM, and a 20-nt guide RNA sequence can base pair with an opposite strand to mediate a Cas9 cleavage adjacent to a PAM. In some embodiments, an adjacent cut can be or can be about 3 base pairs upstream of a PAM. In some embodiments, an adjacent cut can be or can be about 10 base pairs upstream of a PAM. In some embodiments, an adjacent cut can be or can be about 0-20 base pairs upstream of a PAM. For example, an adjacent cut can be next to, 1, 2, 3, 4, 5, 6, 7, 8, 9, 10, 11, 12, 13, 14, 15, 16, 17, 18, 19, 20, 21, 22, 23, 24, 25, 26, 27, 28, 29, or 30 base pairs upstream of a PAM. An adjacent cut can also be downstream of a PAM by 1 to 30 base pairs. The sequences of exemplary SpCas9 proteins capable of binding a PAM sequence follow:

[0545] In some embodiments, engineered SpCas9 variants are capable of recognizing protospacer adjacent motif (PAM) sequences flanked by a 3′ H (non-G PAM) (see Tables 2 and 3A-3C). In some embodiments, the SpCas9 variants recognize NRNH PAMs (where R is A or G and H is A, C or T). In some embodiments, the non-G PAM is NRRH, NRTH, or NRCH (see e.g., Miller, S. M., et al. Continuous evolution of SpCas9 variants compatible with non-G PAMs, Nat. Biotechnol. (2020), the contents of which is incorporated herein by reference in its entirety).

[0546] In some embodiments, the Cas9 domain is a recombinant Cas9 domain. In some embodiments, the recombinant Cas9 domain is a SpyMacCas9 domain. In some embodiments, the SpyMacCas9 domain is a nuclease active SpyMacCas9, a nuclease inactive SpyMacCas9 (SpyMacCas9d), or a SpyMacCas9 nickase (SpyMacCas9n). In some embodiments, the SaCas9 domain, the SaCas9d domain, or the SaCas9n domain can bind to a nucleic acid sequence having a non-canonical PAM. In some embodiments, the SpyMacCas9 domain, the SpCas9d domain, or the SpCas9n domain can bind to a nucleic acid sequence having a NAA PAM sequence.

[0547] The sequence of an exemplary Cas9 A homolog of Spy Cas9 in Streptococcus macacae with native 5′-NAAN-3′ PAM specificity is known in the art and described, for example, by Chatterjee, et al., “A Cas9 with PAM recognition for adenine dinucleotides”, Nature Communications, vol. 11, article no. 2474 (2020), and is in the Sequence Listing as SEQ ID NO: 237.

[0548] In some embodiments, a variant Cas9 protein harbors, H840A, P475A, W476A, N477A, D1125A, W1126A, and D1218A mutations such that the polypeptide has a reduced ability to cleave a target DNA or RNA. Such a Cas9 protein has a reduced ability to cleave a target DNA (e.g., a single stranded target DNA) but retains the ability to bind a target DNA (e.g., a single stranded target DNA). As another non-limiting example, in some embodiments, the variant Cas9 protein harbors D10A, H840A, P475A, W476A, N477A, D1125A, W1126A, and D1218A mutations such that the polypeptide has a reduced ability to cleave a target DNA. Such a Cas9 protein has a reduced ability to cleave a target DNA (e.g., a single stranded target DNA) but retains the ability to bind a target DNA (e.g., a single stranded target DNA). In some embodiments, when a variant Cas9 protein harbors W476A and WI 126A mutations or when the variant Cas9 protein harbors P475A, W476A, N477A, D1125A, W1126A, and D1218A mutations, the variant Cas9 protein does not bind efficiently to a PAM sequence. Thus, in some such cases, when such a variant Cas9 protein is used in a method of binding, the method does not require a PAM sequence. In other words, in some embodiments, when such a variant Cas9 protein is used in a method of binding, the method can include a guide RNA, but the method can be performed in the absence of a PAM sequence (and the specificity of binding is therefore provided by the targeting segment of the guide RNA). Other residues can be mutated to achieve the above effects (i.e., inactivate one or the other nuclease portions). As non-limiting examples, residues D10, G12, G17, E762, H840, N854, N863, H982, H983, A984, D986, and/or A987 can be altered (i.e., substituted). Also, mutations other than alanine substitutions are suitable.

[0549] In some embodiments, a CRISPR protein-derived domain of a base editor can comprise all or a portion of a Cas9 protein with a canonical PAM sequence (NGG). In other embodiments, a Cas9-derived domain of a base editor can employ a non-canonical PAM sequence. Such sequences have been described in the art and would be apparent to the skilled artisan. For example, Cas9 domains that bind non-canonical PAM sequences have been described in Kleinstiver, B. P., et al., “Engineered CRISPR-Cas9 nucleases with altered PAM specificities” Nature 523, 481-485 (2015); and Kleinstiver, B. P., et al., “Broadening the targeting range of Staphylococcus aureus CRISPR-Cas9 by modifying PAM recognition” Nature Biotechnology 33, 1293-1298 (2015); R. T. Walton et al. “Unconstrained genome targeting with near-PAMless engineered CRISPR-Cas9 variants” Science 10.1126/science.aba8853 (2020); Hu et al. “Evolved Cas9 variants with broad PAM compatibility and high DNA specificity,” Nature, 2018 Apr. 5, 556(7699), 57-63; Miller et al., “Continuous evolution of SpCas9 variants compatible with non-G PAMs” Nat. Biotechnol., 2020 April;38(4):471-481; the entire contents of each are hereby incorporated by reference.

Fusion Proteins and Complexes Comprising a NapDNAbp and a Cytidine Deaminase and/or Adenosine Deaminase

[0550] Some aspects of the disclosure provide fusion proteins comprising a Cas9 domain or other nucleic acid programmable DNA binding protein (e.g., Cas12) and one or more cytidine deaminase or adenosine deaminase domains. It should be appreciated that the Cas9 domain may be any of the Cas9 domains or Cas9 proteins (e.g., dCas9 or nCas9) provided herein. In some embodiments, any of the Cas9 domains or Cas9 proteins (e.g., dCas9 or nCas9) provided herein may be fused with any of the cytidine deaminases and/or adenosine deaminases provided herein. The domains of the base editors disclosed herein can be arranged in any order.

[0551] In some embodiments, the fusion protein comprises the following domains A-C, A-D, or A-E:
[0552] NH2-[A-B-C]-COOH;
[0553] NH2-[A-B-C-D]-COOH; or
[0554] NH2-[A-B-C-D-E]-COOH;
   wherein A and C or A, C, and E, each comprises one or more of the following:
[0555] an adenosine deaminase domain or an active fragment thereof,
[0556] a cytidine deaminase domain or an active fragment thereof, and
[0557] wherein B or B and D, each comprises one or more domains having nucleic acid sequence specific binding activity.

[0558] In some embodiments, the fusion protein comprises the following structure:
[0559] NH2-[Aₙ-Bₒ-Cₙ]-COOH;
[0560] NH2-[Aₙ-Bₒ-Cₙ-Dₒ]-COOH; or
[0561] NH2-[Aₙ-Bₒ-Cₚ-Dₒ-E_{q}]-COOH;
   wherein A and C or A, C, and E, each comprises one or more of the following:
[0562] an adenosine deaminase domain or an active fragment thereof,
[0563] a cytidine deaminase domain or an active fragment thereof, and
   wherein n is an integer: 1, 2, 3, 4, or 5, wherein p is an integer: 0, 1, 2, 3, 4, or 5; wherein q is an integer 0, 1, 2, 3, 4, or 5; and wherein B or B and D each comprises a domain having nucleic acid sequence specific binding activity; and wherein o is an integer: 1, 2, 3, 4, or 5.

[0564] For example, and without limitation, in some embodiments, the fusion protein comprises the structure:
[0565] NH2-[adenosine deaminase]-[Cas9 domain]-COOH;
[0566] NH2-[Cas9 domain]-[adenosine deaminase]-COOH;
[0567] NH2-[cytidine deaminase]-[Cas9 domain]-COOH;
[0568] NH2-[Cas9 domain]-[cytidine deaminase]-COOH;
[0569] NH2-[cytidine deaminase]-[Cas9 domain]-[adenosine deaminase]-COOH;
[0570] NH2-[adenosine deaminase]-[Cas9 domain]-[cytidine deaminase]-COOH;
[0571] NH2-[adenosine deaminase]-[cytidine deaminase]-[Cas9 domain]-COOH;
[0572] NH2-[cytidine deaminase]-[adenosine deaminase]-[Cas9 domain]-COOH;
[0573] NH2-[Cas9 domain]-[adenosine deaminase]-[cytidine deaminase]-COOH; or
[0574] NH2-[Cas9 domain]-[cytidine deaminase]-[adenosine deaminase]-COOH.

[0575] In some embodiments, any of the Cas12 domains or Cas12 proteins provided herein may be fused with any of the cytidine or adenosine deaminases provided herein. For example, and without limitation, in some embodiments, the fusion protein comprises the structure:
[0576] NH2-[adenosine deaminase]-[Cas12 domain]-COOH;
[0577] NH2-[Cas12 domain]-[adenosine deaminase]-COOH;
[0578] NH2-[cytidine deaminase]-[Cas12 domain]-COOH;
[0579] NH2-[Cas12 domain]-[cytidine deaminase]-COOH;
[0580] NH2-[cytidine deaminase]-[Cas12 domain]-[adenosine deaminase]-COOH;
[0581] NH2-[adenosine deaminase]-[Cas12 domain]-[cytidine deaminase]-COOH;
[0582] NH2-[adenosine deaminase]-[cytidine deaminase]-[Cas12 domain]-COOH;
[0583] NH2-[cytidine deaminase]-[adenosine deaminase]-[Cas12 domain]-COOH;
[0584] NH2-[Cas12 domain]-[adenosine deaminase]-[cytidine deaminase]-COOH; or
[0585] NH2-[Cas12 domain]-[cytidine deaminase]-[adenosine deaminase]-COOH.

[0586] In some embodiments, the adenosine deaminase is a TadA*8. Exemplary fusion protein structures include the following:
[0587] NH2-[TadA*8]-[Cas9 domain]-COOH;
[0588] NH2-[Cas9 domain]-[TadA*8]-COOH;
[0589] NH2-[TadA*8]-[Cas12 domain]-COOH; or
[0590] NH2-[Cas12 domain]-[TadA*8]-COOH.

[0591] In some embodiments, the adenosine deaminase of the fusion protein comprises a TadA*8 and a cytidine deaminase and/or an adenosine deaminase. In some embodiments, the TadA*8 is TadA*8.1, TadA*8.2, TadA*8.3, TadA*8.4, TadA*8.5, TadA*8.6, TadA*8.7, TadA*8.8, TadA*8.9, TadA*8.10, TadA*8.11, TadA*8.12, TadA*8.13, TadA*8.14, TadA*8.15, TadA*8.16, TadA*8.17, TadA*8.18, TadA*8.19, TadA*8.20, TadA*8.21, TadA*8.22, TadA*8.23, or TadA*8.24.

[0592] Exemplary fusion protein structures include the following:
[0593] NH2-[TadA*8]-[Cas9/Cas12]-[adenosine deaminase]-COOH;
[0594] NH2-[adenosine deaminase]-[Cas9/Cas12]-[TadA*8]-COOH;
[0595] NH2-[TadA*8]-[Cas9/Cas12]-[cytidine deaminase]-COOH; or
[0596] NH2-[cytidine deaminase]-[Cas9/Cas12]-[TadA*8]-COOH.

[0597] In some embodiments, the adenosine deaminase of the fusion protein comprises a TadA*9 and a cytidine deaminase and/or an adenosine deaminase. Exemplary fusion protein structures include the following:
[0598] NH2-[TadA*9]-[Cas9/Cas12]-[adenosine deaminase]-COOH;
[0599] NH2-[adenosine deaminase]-[Cas9/Cas12]-[TadA*9]-COOH;
[0600] NH2-[TadA*9]-[Cas9/Cas12]-[cytidine deaminase]-COOH; or
[0601] NH2-[cytidine deaminase]-[Cas9/Cas12]-[TadA*9]-COOH.

[0602] In some embodiments, the fusion protein can comprise a deaminase flanked by an N-terminal fragment and a C-terminal fragment of a Cas9 or Cas12 polypeptide. In some embodiments, the fusion protein comprises a cytidine deaminase flanked by an N-terminal fragment and a C-terminal fragment of a Cas9 or Cas12 polypeptide. In some embodiments, the fusion protein comprises an adenosine deaminase flanked by an N-terminal fragment and a C-terminal fragment of a Cas9 or Cas 12 polypeptide.

[0603] In some embodiments, the fusion proteins comprising a cytidine deaminase or adenosine deaminase and a napDNAbp (e.g., Cas9 or Cas12 domain) do not include a linker sequence. In some embodiments, a linker is present between the cytidine or adenosine deaminase and the napDNAbp. In some embodiments, the “-” used in the general architecture above indicates the presence of an optional linker. In some embodiments, cytidine or adenosine deaminase and the napDNAbp are fused via any of the linkers provided herein. For example, in some embodiments the cytidine or adenosine deaminase and the napDNAbp are fused via any of the linkers provided herein.

[0604] It should be appreciated that the fusion proteins of the present disclosure may comprise one or more additional features. For example, in some embodiments, the fusion protein may comprise inhibitors, cytoplasmic localization sequences, export sequences, such as nuclear export sequences, or other localization sequences, as well as sequence tags that are useful for solubilization, purification, or detection of the fusion proteins. Suitable protein tags provided herein include, but are not limited to, biotin carboxylase carrier protein (BCCP) tags, myc-tags, calmodulin-tags, FLAG-tags, hemagglutinin (HA)-tags, polyhistidine tags, also referred to as histidine tags or His-tags, maltose binding protein (MBP)-tags, nus-tags, glutathione-S-transferase (GST)-tags, green fluorescent protein (GFP)-tags, thioredoxin-tags, S-tags, Softags (e.g., Softag 1, Softag 3), strep-tags, biotin ligase tags, FlAsH tags, V5 tags, and SBP-tags. Additional suitable sequences will be apparent to those of skill in the art. In some embodiments, the fusion protein comprises one or more His tags.

[0605] Exemplary, yet nonlimiting, fusion proteins are described in International PCT Application Nos. PCT/2017/044935, PCT/US2019/044935, and PCT/US2020/016288, each of which is incorporated herein by reference for its entirety.

### Fusion Proteins Comprising a Nuclear Localization Sequence (NLS)

[0606] In some embodiments, the fusion proteins provided herein further comprise one or more (e.g., 2, 3, 4, 5) nuclear targeting sequences, for example a nuclear localization sequence (NLS). In one embodiment, a bipartite NLS is used. In some embodiments, a NLS comprises an amino acid sequence that facilitates the importation of a protein, that comprises an NLS, into the cell nucleus (e.g., by nuclear transport). In some embodiments, the NLS is fused to the N-terminus or the C-terminus of the fusion protein. In some embodiments, the NLS is fused to the C-terminus or N-terminus of an nCas9 domain or a dCas9 domain. In some embodiments, the NLS is fused to the N-terminus or C-terminus of the Cas12 domain. In some embodiments, the NLS is fused to the N-terminus or C-terminus of the cytidine or adenosine deaminase. In some embodiments, the NLS is fused to the fusion protein via one or more linkers. In some embodiments, the NLS is fused to the fusion protein without a linker. In some embodiments, the NLS comprises an amino acid sequence of any one of the NLS sequences provided or referenced herein. Additional nuclear localization sequences are known in the art and would be apparent to the skilled artisan. For example, NLS sequences are described in Plank et al., PCT/EP2000/011690, the contents of which are incorporated herein by reference for their disclosure of exemplary nuclear localization sequences. In some embodiments, an NLS comprises the amino acid sequence PKKKRKVEGADKRTADGSEFESPKKKRKV (SEQ ID NO: 328), KRTADGSEFESPKKKRKV (SEQ ID NO: 190), KRPAATKKAGQAKKKK (SEQ ID NO: 191), KKTELQTTNAENKTKKL (SEQ ID NO: 192), KRGINDRNFWRGENGRKTR (SEQ ID NO: 193), RKSGKIAAIVVKRPRKPKKKRKV (SEQ ID NO: 329), or MDSLLMNRRKFLYQFKNVRWAKGRRETYLC (SEQ ID NO: 196).

[0607] In some embodiments, the fusion proteins comprising a cytidine or adenosine deaminase, a Cas9 domain, and an NLS do not comprise a linker sequence. In some embodiments, linker sequences between one or more of the domains or proteins (e.g., cytidine or adenosine deaminase, Cas9 domain or NLS) are present. In some embodiments, a linker is present between the cytidine deaminase and adenosine deaminase domains and the napDNAbp. In some embodiments, the “-” used in the general architecture below indicates the presence of an optional linker. In some embodiments, the cytidine deaminase and adenosine deaminase and the napDNAbp are fused via any of the linkers provided herein. For example, in some embodiments the cytidine deaminase and adenosine deaminase and the napDNAbp are fused via any of the linkers provided herein.

[0608] In some embodiments, the general architecture of exemplary napDNAbp (e.g., Cas9 or Cas12) fusion proteins with a cytidine or adenosine deaminase and a napDNAbp (e.g., Cas9 or Cas12) domain comprises any one of the following structures, where NLS is a nuclear localization sequence (e.g., any NLS provided herein), NH₂ is the N-terminus of the fusion protein, and COOH is the C-terminus of the fusion protein:
[0609] NH₂-NLS-[cytidine deaminase]-[napDNAbp domain]-COOH;
[0610] NH₂-NLS [napDNAbp domain]-[cytidine deaminase]-COOH;
[0611] NH₂-[cytidine deaminase]-[napDNAbp domain]-NLS—COOH;
[0612] NH₂-[napDNAbp domain]-[cytidine deaminase]-NLS—COOH;
[0613] NH₂-NLS-[adenosine deaminase]-[napDNAbp domain]-COOH;
[0614] NH₂-NLS [napDNAbp domain]-[adenosine deaminase]-COOH;
[0615] NH₂-[adenosine deaminase]-[napDNAbp domain]-NLS—COOH;
[0616] NH₂-[napDNAbp domain]-[adenosine deaminase]-NLS—COOH;
[0617] NH₂-NLS-[cytidine deaminase]-[napDNAbp domain]-[adenosine deaminase]-COOH;
[0618] NH₂-NLS-[adenosine deaminase]-[napDNAbp domain]-[cytidine deaminase]-COOH;
[0619] NH₂-NLS-[adenosine deaminase] [cytidine deaminase]-[napDNAbp domain]-COOH;
[0620] NH₂-NLS-[cytidine deaminase]-[adenosine deaminase]-[napDNAbp domain]-COOH;
[0621] NH₂-NLS-[napDNAbp domain]-[adenosine deaminase]-[cytidine deaminase]-COOH;
[0622] NH₂-NLS-[napDNAbp domain]-[cytidine deaminase]-[adenosine deaminase]-COOH;
[0623] NH₂-[cytidine deaminase]-[napDNAbp domain]-[adenosine deaminase]-NLS—COOH;
[0624] NH₂-[adenosine deaminase]-[napDNAbp domain]-[cytidine deaminase]-NLS—COOH;
[0625] NH₂-[adenosine deaminase] [cytidine deaminase]-[napDNAbp domain]-NLS—COOH;
[0626] NH₂-[cytidine deaminase]-[adenosine deaminase]-[napDNAbp domain]-NLS—COOH;
[0627] NH₂-[napDNAbp domain]-[adenosine deaminase]-[cytidine deaminase]-NLS—COOH; or
[0628] NH₂-[napDNAbp domain]-[cytidine deaminase]-[adenosine deaminase]-NLS—COOH. In some embodiments, the NLS is present in a linker or the NLS is flanked by linkers, for example described herein. A bipartite NLS comprises two basic amino acid clusters, which are separated by a relatively short spacer sequence (hence bipartite—2 parts, while monopartite NLSs are not). The NLS of nucleoplasmin, KR[PAATKKAGQA]KKKK (SEQ ID NO: 191), is the prototype of the ubiquitous bipartite signal: two clusters of basic amino acids, separated by a spacer of about 10 amino acids. The sequence of an exemplary bipartite NLS follows:

(SEQ ID NO: 328)
PKKKRKVEGADKRTADGSEFESPKKKRKV

[0629] A vector that encodes a CRISPR enzyme comprising one or more nuclear localization sequences (NLSs) can be used. For example, there can be or be about 1, 2, 3, 4, 5, 6, 7, 8, 9, 10 NLSs used. A CRISPR enzyme can comprise the NLSs at or near the amino-terminus, about or more than about 1, 2, 3, 4, 5, 6, 7, 8, 9, 10 NLSs at or near the carboxy-terminus, or any combination thereof (e.g., one or more NLS at the amino-terminus and one or more NLS at the carboxy terminus). When more than one NLS is present, each can be selected independently of others, such that a single NLS can be present in more than one copy and/or in combination with one or more other NLSs present in one or more copies.

[0630] CRISPR enzymes used in the methods can comprise about 6 NLSs. An NLS is considered near the N- or C-terminus when the nearest amino acid to the NLS is within about 50 amino acids along a polypeptide chain from the N- or C-terminus, e.g., within 1, 2, 3, 4, 5, 10, 15, 20, 25, 30, 40, or 50 amino acids.

### Additional Domains

[0631] A base editor described herein can include any domain which helps to facilitate the nucleobase editing, modification or altering of a nucleobase of a polynucleotide. In some embodiments, a base editor comprises a polynucleotide programmable nucleotide binding domain (e.g., Cas9), a nucleobase editing domain (e.g., deaminase domain), and one or more additional domains. In some embodiments, the additional domain can facilitate enzymatic or catalytic functions of the base editor, binding functions of the base editor, or be inhibitors of cellular machinery (e.g., enzymes) that could interfere with the desired base editing result. In some embodiments, a base editor can comprise a nuclease, a nickase, a recombinase, a deaminase, a methyltransferase, a methylase, an acetylase, an acetyltransferase, a transcriptional activator, or a transcriptional repressor domain.

[0632] In some embodiments, a base editor can comprise an uracil glycosylase inhibitor (UGI) domain. In some embodiments, cellular DNA repair response to the presence of U: G heteroduplex DNA can be responsible for a decrease in nucleobase editing efficiency in cells. In such embodiments, uracil DNA glycosylase (UDG) can catalyze removal of U from DNA in cells, which can initiate base excision repair (BER), mostly resulting in reversion of the U:G pair to a C:G pair. In such embodiments, BER can be inhibited in base editors comprising one or more domains that bind the single strand, block the edited base, inhibit UGI, inhibit BER, protect the edited base, and/or promote repairing of the non-edited strand. Thus, this disclosure contemplates a base editor fusion protein comprising a UGI domain.

[0633] In some embodiments, a base editor comprises as a domain all or a portion of a double-strand break (DSB) binding protein. For example, a DSB binding protein can include a Gam protein of bacteriophage Mu that can bind to the ends of DSBs and can protect them from degradation. See Komor, A. C., et al., “Improved base excision repair inhibition and bacteriophage Mu Gam protein yields C:G-to-T:A base editors with higher efficiency and product purity” Science Advances 3:eaao4774 (2017), the entire content of which is hereby incorporated by reference.

[0634] Additionally, in some embodiments, a Gam protein can be fused to an N terminus of a base editor. In some embodiments, a Gam protein can be fused to a C terminus of a base editor. The Gam protein of bacteriophage Mu can bind to the ends of double strand breaks (DSBs) and protect them from degradation. In some embodiments, using Gam to bind the free ends of DSB can reduce indel formation during the process of base editing. In some embodiments, 174-residue Gam protein is fused to the N terminus of the base editors. See Komor, A. C., et al., “Improved base excision repair inhibition and bacteriophage Mu Gam protein yields C:G-to-T:A base editors with higher efficiency and product purity” Science Advances 3:eaao4774 (2017). In some embodiments, a mutation or mutations can change the length of a base editor domain relative to a wild type domain. For example, a deletion of at least one amino acid in at least one domain can reduce the length of the base editor. In another case, a mutation or mutations do not change the length of a domain relative to a wild type domain. For example, substitutions in any domain does not change the length of the base editor.

[0635] Non-limiting examples of such base editors, where the length of all the domains is the same as the wild type domains, can include:
[0636] NH2-[nucleobase editing domain]-Linker1-[APOBEC1]-Linker2-[nucleobase editing domain]-COOH;
[0637] NH2-[nucleobase editing domain]-Linker1-[APOBEC1]-[nucleobase editing domain]-COOH;
[0638] NH2-[nucleobase editing domain]-[APOBEC1]-Linker2-[nucleobase editing domain]-COOH;
[0639] NH2-[nucleobase editing domain]-[APOBEC1]-[nucleobase editing domain]-COOH;
[0640] NH2-[nucleobase editing domain]-Linker1-[APOBEC1]-Linker2-[nucleobase editing domain]-[UGI]-COOH;
[0641] NH2-[nucleobase editing domain]-Linker1-[APOBEC1]-[nucleobase editing domain]-[UGI]-COOH;
[0642] NH2-[nucleobase editing domain]-[APOBEC1]-Linker2-[nucleobase editing domain]-[UGI]-COOH;
[0643] NH2-[nucleobase editing domain]-[APOBEC1]-[nucleobase editing domain]-[UGI]-COOH;
[0644] NH2-[UGI]-[nucleobase editing domain]-Linker1-[APOBEC1]-Linker2-[nucleobase editing domain]-COOH;
[0645] NH2-[UGI]-[nucleobase editing domain]-Linker1-[APOBEC1]-[nucleobase editing domain]-COOH;
[0646] NH2-[UGI]-[nucleobase editing domain]-[APOBEC1]-Linker2-[nucleobase editing domain]-COOH; or
[0647] NH2-[UGI]-[nucleobase editing domain]-[APOBEC1]-[nucleobase editing domain]-COOH.

### Base Editor Systems

[0648] Provided herein are systems, compositions, and methods for editing a nucleobase using a base editor system. In some embodiments, the base editor system comprises (1) a base editor (BE) comprising a polynucleotide programmable nucleotide binding domain and a nucleobase editing domain (e.g., a deaminase domain) for editing the nucleobase; and (2) a guide polynucleotide (e.g., guide RNA) in conjunction with the polynucleotide programmable nucleotide binding domain. In some embodiments, the base editor system is a cytidine base editor (CBE) or an adenosine base editor (ABE). In some embodiments, the polynucleotide programmable nucleotide binding domain is a polynucleotide programmable DNA or RNA binding domain. In some embodiments, the nucleobase editing domain is a deaminase domain. In some embodiments, a deaminase domain can be a cytidine deaminase or an cytosine deaminase. In some embodiments, a deaminase domain can be an adenine deaminase or an adenosine deaminase. In some embodiments, the adenosine base editor can deaminate adenine in DNA. In some embodiments, the base editor is capable of deaminating a cytidine in DNA.

[0649] In some embodiments, a base editing system as provided herein provides a new approach to genome editing that uses a fusion protein containing a catalytically defective Streptococcus pyogenes Cas9, a deaminase (e.g., cytidine or adenosine deaminase), and an inhibitor of base excision repair to induce programmable, single nucleotide (C-T or A-G) changes in DNA without generating double-strand DNA breaks, without requiring a donor DNA template, and without inducing an excess of stochastic insertions and deletions.

[0650] Details of nucleobase editing proteins are described in International PCT Application Nos. PCT/2017/045381 (WO2018/027078) and PCT/US2016/058344 (WO2017/070632), each of which is incorporated herein by reference for its entirety. Also see Komor, A. C., et al., “Programmable editing of a target base in genomic DNA without double-stranded DNA cleavage” Nature 533, 420-424 (2016); Gaudelli, N. M., et al., “Programmable base editing of A•T to G•C in genomic DNA without DNA cleavage” Nature 551, 464-471 (2017); and Komor, A. C., et al., “Improved base excision repair inhibition and bacteriophage Mu Gam protein yields C:G-to-T:A base editors with higher efficiency and product purity” Science Advances 3:eaao4774 (2017), the entire contents of which are hereby incorporated by reference.

[0651] Use of the base editor system provided herein comprises the steps of: (a) contacting a target nucleotide sequence of a polynucleotide (e.g., double- or single stranded DNA or RNA) of a subject with a base editor system comprising a nucleobase editor (e.g., an adenosine base editor or a cytidine base editor) and a guide polynucleic acid (e.g., gRNA), wherein the target nucleotide sequence comprises a targeted nucleobase pair; (b) inducing strand separation of said target region; (c) converting a first nucleobase of said target nucleobase pair in a single strand of the target region to a second nucleobase; and (d) cutting no more than one strand of said target region, where a third nucleobase complementary to the first nucleobase base is replaced by a fourth nucleobase complementary to the second nucleobase. It should be appreciated that in some embodiments, step (b) is omitted. In some embodiments, said targeted nucleobase pair is a plurality of nucleobase pairs in one or more genes. In some embodiments, the base editor system provided herein is capable of multiplex editing of a plurality of nucleobase pairs in one or more genes. In some embodiments, the plurality of nucleobase pairs is located in the same gene. In some embodiments, the plurality of nucleobase pairs is located in one or more genes, wherein at least one gene is located in a different locus.

[0652] In some embodiments, the cut single strand (nicked strand) is hybridized to the guide nucleic acid. In some embodiments, the cut single strand is opposite to the strand comprising the first nucleobase. In some embodiments, the base editor comprises a Cas9 domain. In some embodiments, the first base is adenine, and the second base is not a G, C, A, or T. In some embodiments, the second base is inosine.

[0653] In some embodiments, a single guide polynucleotide may be utilized to target a deaminase to a target nucleic acid sequence. In some embodiments, a single pair of guide polynucleotides may be utilized to target different deaminases to a target nucleic acid sequence.

[0654] The nucleobase components and the polynucleotide programmable nucleotide binding component of a base editor system may be associated with each other covalently or non-covalently. For example, in some embodiments, the deaminase domain can be targeted to a target nucleotide sequence by a polynucleotide programmable nucleotide binding domain. In some embodiments, a polynucleotide programmable nucleotide binding domain can be fused or linked to a deaminase domain. In some embodiments, a polynucleotide programmable nucleotide binding domain can target a deaminase domain to a target nucleotide sequence by non-covalently interacting with or associating with the deaminase domain. For example, in some embodiments, the nucleobase editing component, e.g., the deaminase component can comprise an additional heterologous portion or domain that is capable of interacting with, associating with, or capable of forming a complex with an additional heterologous portion or domain that is part of a polynucleotide programmable nucleotide binding domain. In some embodiments, the additional heterologous portion may be capable of binding to, interacting with, associating with, or forming a complex with a polypeptide. In some embodiments, the additional heterologous portion may be capable of binding to, interacting with, associating with, or forming a complex with a polynucleotide. In some embodiments, the additional heterologous portion may be capable of binding to a guide polynucleotide. In some embodiments, the additional heterologous portion may be capable of binding to a polypeptide linker. In some embodiments, the additional heterologous portion may be capable of binding to a polynucleotide linker. The additional heterologous portion may be a protein domain. In some embodiments, the additional heterologous portion may be a K Homology (KH) domain, a MS2 coat protein domain, a PP7 coat protein domain, a SfMu Corn coat protein domain, a steril alpha motif, a telomerase Ku binding motif and Ku protein, a telomerase Sm7 binding motif and Sm7 protein, or an RNA recognition motif.

[0655] A base editor system may further comprise a guide polynucleotide component. It should be appreciated that components of the base editor system may be associated with each other via covalent bonds, noncovalent interactions, or any combination of associations and interactions thereof. In some embodiments, a deaminase domain can be targeted to a target nucleotide sequence by a guide polynucleotide. For example, in some embodiments, the nucleobase editing component of the base editor system, e.g., the deaminase component, can comprise an additional heterologous portion or domain (e.g., polynucleotide binding domain such as an RNA or DNA binding protein) that is capable of interacting with, associating with, or capable of forming a complex with a portion or segment (e.g., a polynucleotide motif) of a guide polynucleotide. In some embodiments, the additional heterologous portion or domain (e.g., polynucleotide binding domain such as an RNA or DNA binding protein) can be fused or linked to the deaminase domain. In some embodiments, the additional heterologous portion may be capable of binding to, interacting with, associating with, or forming a complex with a polypeptide. In some embodiments, the additional heterologous portion may be capable of binding to, interacting with, associating with, or forming a complex with a polynucleotide. In some embodiments, the additional heterologous portion may be capable of binding to a guide polynucleotide. In some embodiments, the additional heterologous portion may be capable of binding to a polypeptide linker. In some embodiments, the additional heterologous portion may be capable of binding to a polynucleotide linker. The additional heterologous portion may be a protein domain. In some embodiments, the additional heterologous portion may be a K Homology (KH) domain, a MS2 coat protein domain, a PP7 coat protein domain, a SfMu Corn coat protein domain, a sterile alpha motif, a telomerase Ku binding motif and Ku protein, a telomerase Sm7 binding motif and Sm7 protein, or an RNA recognition motif.

[0656] In some embodiments, a base editor system can further comprise an inhibitor of base excision repair (BER) component. It should be appreciated that components of the base editor system may be associated with each other via covalent bonds, noncovalent interactions, or any combination of associations and interactions thereof. The inhibitor of BER component may comprise a base excision repair inhibitor. In some embodiments, the inhibitor of base excision repair can be a uracil DNA glycosylase inhibitor (UGI). In some embodiments, the inhibitor of base excision repair can be an inosine base excision repair inhibitor. In some embodiments, the inhibitor of base excision repair can be targeted to the target nucleotide sequence by the polynucleotide programmable nucleotide binding domain. In some embodiments, a polynucleotide programmable nucleotide binding domain can be fused or linked to an inhibitor of base excision repair. In some embodiments, a polynucleotide programmable nucleotide binding domain can be fused or linked to a deaminase domain and an inhibitor of base excision repair. In some embodiments, a polynucleotide programmable nucleotide binding domain can target an inhibitor of base excision repair to a target nucleotide sequence by non-covalently interacting with or associating with the inhibitor of base excision repair. For example, in some embodiments, the inhibitor of base excision repair component can comprise an additional heterologous portion or domain that is capable of interacting with, associating with, or capable of forming a complex with an additional heterologous portion or domain that is part of a polynucleotide programmable nucleotide binding domain. In some embodiments, the inhibitor of base excision repair can be targeted to the target nucleotide sequence by the guide polynucleotide. For example, in some embodiments, the inhibitor of base excision repair can comprise an additional heterologous portion or domain (e.g., polynucleotide binding domain such as an RNA or DNA binding protein) that is capable of interacting with, associating with, or capable of forming a complex with a portion or segment (e.g., a polynucleotide motif) of a guide polynucleotide. In some embodiments, the additional heterologous portion or domain of the guide polynucleotide (e.g., polynucleotide binding domain such as an RNA or DNA binding protein) can be fused or linked to the inhibitor of base excision repair. In some embodiments, the additional heterologous portion may be capable of binding to, interacting with, associating with, or forming a complex with a polynucleotide. In some embodiments, the additional heterologous portion may be capable of binding to a guide polynucleotide. In some embodiments, the additional heterologous portion may be capable of binding to a polypeptide linker. In some embodiments, the additional heterologous portion may be capable of binding to a polynucleotide linker. The additional heterologous portion may be a protein domain. In some embodiments, the additional heterologous portion may be a K Homology (KH) domain, a MS2 coat protein domain, a PP7 coat protein domain, a SfMu Corn coat protein domain, a sterile alpha motif, a telomerase Ku binding motif and Ku protein, a telomerase Sm7 binding motif and Sm7 protein, or an RNA recognition motif.

[0657] In some embodiments, the base editor inhibits base excision repair (BER) of the edited strand. In some embodiments, the base editor protects or binds the non-edited strand. In some embodiments, the base editor comprises UGI activity. In some embodiments, the base editor comprises a catalytically inactive inosine-specific nuclease. In some embodiments, the base editor comprises nickase activity. In some embodiments, the intended edit of base pair is upstream of a PAM site. In some embodiments, the intended edit of base pair is 1, 2, 3, 4, 5, 6, 7, 8, 9, 10, 11, 12, 13, 14, 15, 16, 17, 18, 19, or 20 nucleotides upstream of the PAM site. In some embodiments, the intended edit of base-pair is downstream of a PAM site. In some embodiments, the intended edited base pair is 1, 2, 3, 4, 5, 6, 7, 8, 9, 10, 11, 12, 13, 14, 15, 16, 17, 18, 19, or 20 nucleotides downstream stream of the PAM site.

[0658] In some embodiments, the method does not require a canonical (e.g., NGG) PAM site. In some embodiments, the nucleobase editor comprises a linker or a spacer. In some embodiments, the linker or spacer is 1-25 amino acids in length. In some embodiments, the linker or spacer is 5-20 amino acids in length. In some embodiments, the linker or spacer is 10, 11, 12, 13, 14, 15, 16, 17, 18, 19, or 20 amino acids in length.

[0659] In some embodiments, the base editing fusion proteins provided herein need to be positioned at a precise location, for example, where a target base is placed within a defined region (e.g., a “deamination window”). In some embodiments, a target can be within a 4 base region. In some embodiments, such a defined target region can be approximately 15 bases upstream of the PAM. See Komor, A. C., et al., “Programmable editing of a target base in genomic DNA without double-stranded DNA cleavage” Nature 533, 420-424 (2016); Gaudelli, N. M., et al., “Programmable base editing of A•T to G•C in genomic DNA without DNA cleavage” Nature 551, 464-471 (2017); and Komor, A. C., et al., “Improved base excision repair inhibition and bacteriophage Mu Gam protein yields C:G-to-T:A base editors with higher efficiency and product purity” Science Advances 3:eaao4774 (2017), the entire contents of which are hereby incorporated by reference.

[0660] In some embodiments, the target region comprises a target window, wherein the target window comprises the target nucleobase pair. In some embodiments, the target window comprises 1-10 nucleotides. In some embodiments, the target window is 1, 2, 3, 4, 5, 6, 7, 8, 9, 10, 11, 12, 13, 14, 15, 16, 17, 18, 19, or 20 nucleotides in length. In some embodiments, the intended edit of base pair is within the target window. In some embodiments, the target window comprises the intended edit of base pair. In some embodiments, the method is performed using any of the base editors provided herein. In some embodiments, a target window is a deamination window. A deamination window can be the defined region in which a base editor acts upon and deaminates a target nucleotide. In some embodiments, the deamination window is within a 2, 3, 4, 5, 6, 7, 8, 9, or 10 base regions. In some embodiments, the deamination window is 5, 6, 7, 8, 9, 10, 11, 12, 13, 14, 15, 16, 17, 18, 19, 20, 21, 22, 23, 24, or 25 bases upstream of the PAM.

[0661] The base editors of the present disclosure can comprise any domain, feature or amino acid sequence which facilitates the editing of a target polynucleotide sequence. For example, in some embodiments, the base editor comprises a nuclear localization sequence (NLS). In some embodiments, an NLS of the base editor is localized between a deaminase domain and a polynucleotide programmable nucleotide binding domain. In some embodiments, an NLS of the base editor is localized C-terminal to a polynucleotide programmable nucleotide binding domain.

[0662] Other exemplary features that can be present in a base editor as disclosed herein are localization sequences, such as cytoplasmic localization sequences, export sequences, such as nuclear export sequences, or other localization sequences, as well as sequence tags that are useful for solubilization, purification, or detection of the fusion proteins. Suitable protein tags provided herein include, but are not limited to, biotin carboxylase carrier protein (BCCP) tags, myc-tags, calmodulin-tags, FLAG-tags, hemagglutinin (HA)-tags, polyhistidine tags, also referred to as histidine tags or His-tags, maltose binding protein (MBP)-tags, nus-tags, glutathione-S-transferase (GST)-tags, green fluorescent protein (GFP)-tags, thioredoxin-tags, S-tags, Softags (e.g., Softag 1, Softag 3), strep-tags, biotin ligase tags, FlAsH tags, V5 tags, and SBP-tags. Additional suitable sequences will be apparent to those of skill in the art. In some embodiments, the fusion protein comprises one or more His tags.

[0663] In some embodiments, non-limiting exemplary cytidine base editors (CBE) include BE1 (APOBEC1-XTEN-dCas9), BE2 (APOBEC1-XTEN-dCas9-UGI), BE3 (APOBEC1-XTEN-dCas9 (A840H)-UGI), BE3-Gam, saBE3, saBE4-Gam, BE4, BE4-Gam, saBE4, or saB4E-Gam. BE4 extends the APOBEC1-Cas9n (D10A) linker to 32 amino acids and the Cas9n-UGI linker to 9 amino acids, and appends a second copy of UGI to the C-terminus of the construct with another 9-amino acid linker into a single base editor construct. The base editors saBE3 and saBE4 have the S. pyogenes Cas9n (D10A) replaced with the smaller S. aureus Cas9n (D10A). BE3-Gam, saBE3-Gam, BE4-Gam, and saBE4-Gam have 174 residues of Gam protein fused to the N-terminus of BE3, saBE3, BE4, and saBE4 via the 16 amino acid XTEN linker.

[0664] In some embodiments, the adenosine base editor (ABE) can deaminate adenine in DNA. In some embodiments, ABE is generated by replacing APOBEC1 component of BE3 with natural or engineered E. coli TadA, human ADAR2, mouse ADA, or human ADAT2. In some embodiments, ABE comprises evolved TadA variant. In some embodiments, the ABE is ABE 1.2 (TadA*-XTEN-nCas9-NLS). In some embodiments, TadA* comprises A106V and D108N mutations.

[0665] In some embodiments, the ABE is a second-generation ABE. In some embodiments, the ABE is ABE2.1, which comprises additional mutations D147Y and E155V in TadA* (TadA*2.1). In some embodiments, the ABE is ABE2.2, ABE2.1 fused to catalytically inactivated version of human alkyl adenine DNA glycosylase (AAG with E125Q mutation). In some embodiments, the ABE is ABE2.3, ABE2.1 fused to catalytically inactivated version of E. coli Endo V (inactivated with D35A mutation). In some embodiments, the ABE is ABE2.6 which has a linker twice as long (32 amino acids, (SGGS)₂ (SEQ ID NO: 330)-XTEN-(SGGS)₂ (SEQ ID NO: 330)) as the linker in ABE2.1. In some embodiments, the ABE is ABE2.7, which is ABE2.1 tethered with an additional wild-type TadA monomer. In some embodiments, the ABE is ABE2.8, which is ABE2.1 tethered with an additional TadA*2.1 monomer. In some embodiments, the ABE is ABE2.9, which is a direct fusion of evolved TadA (TadA*2.1) to the N-terminus of ABE2.1. In some embodiments, the ABE is ABE2.10, which is a direct fusion of wild-type TadA to the N-terminus of ABE2.1. In some embodiments, the ABE is ABE2.11, which is ABE2.9 with an inactivating E59A mutation at the N-terminus of TadA* monomer. In some embodiments, the ABE is ABE2.12, which is ABE2.9 with an inactivating E59A mutation in the internal TadA* monomer.

[0666] In some embodiments, the ABE is a third generation ABE. In some embodiments, the ABE is ABE3.1, which is ABE2.3 with three additional TadA mutations (L84F, H123Y, and 1156F).

[0667] In some embodiments, the ABE is a fourth generation ABE. In some embodiments, the ABE is ABE4.3, which is ABE3.1 with an additional TadA mutation A142N (TadA*4.3).

[0668] In some embodiments, the ABE is a fifth generation ABE. In some embodiments, the ABE is ABE5.1, which is generated by importing a consensus set of mutations from surviving clones (H36L, R51L, S146C, and K157N) into ABE3.1. In some embodiments, the ABE is ABE5.3, which has a heterodimeric construct containing wild-type E. coli TadA fused to an internal evolved TadA*. In some embodiments, the ABE is ABE5.2, ABE5.4, ABE5.5, ABE5.6, ABE5.7, ABE5.8, ABE5.9, ABE5.10, ABE5.11, ABE5.12, ABE5.13, or ABE5.14, as shown in Table 11 below. In some embodiments, the ABE is a sixth generation ABE. In some embodiments, the ABE is ABE6.1, ABE6.2, ABE6.3, ABE6.4, ABE6.5, or ABE6.6, as shown in Table 11 below. In some embodiments, the ABE is a seventh generation ABE. In some embodiments, the ABE is ABE7.1, ABE7.2, ABE7.3, ABE7.4, ABE7.5, ABE7.6, ABE7.7 ABE7.8, ABE 7.9, or ABE7.10, as shown in Table 11 below.

TABLE 11
Genotypes of ABEs

| | 23 | 26 | 36 | 37 | 48 | 49 | 51 | 72 | 84 | 87 | 106 | 108 | 123 | 125 | 142 | 146 | 147 | 152 | 155 | 156 | 157 | 161 |
|---|---|---|---|---|---|---|---|---|---|---|---|---|---|---|---|---|---|---|---|---|---|---|
| ABE0.1 | W | R | H | N | P | | R | N | L | S | A | D | H | G | A | S | D | R | E | I | K | K |
| ABE0.2 | W | R | H | N | P | | R | N | L | S | A | D | H | G | A | S | D | R | E | I | K | K |
| ABE1.1 | W | R | H | N | P | | R | N | L | S | A | N | H | G | A | S | D | R | E | I | K | K |
| ABE1.2 | W | R | H | N | P | | R | N | L | S | V | N | H | G | A | S | D | R | E | I | K | K |
| ABE2.1 | W | R | H | N | P | | R | N | L | S | V | N | H | G | A | S | Y | R | V | I | K | K |
| ABE2.2 | W | R | H | N | P | | R | N | L | S | V | N | H | G | A | S | Y | R | V | I | K | K |
| ABE2.3 | W | R | H | N | P | | R | N | L | S | V | N | H | G | A | S | Y | R | V | I | K | K |
| ABE2.4 | W | R | H | N | P | | R | N | L | S | V | N | H | G | A | S | Y | R | V | I | K | K |
| ABE2.5 | W | R | H | N | P | | R | N | L | S | V | N | H | G | A | S | Y | R | V | I | K | K |
| ABE2.6 | W | R | H | N | P | | R | N | L | S | V | N | H | G | A | S | Y | R | V | I | K | K |
| ABE2.7 | W | R | H | N | P | | R | N | L | S | V | N | H | G | A | S | Y | R | V | I | K | K |
| ABE2.8 | W | R | H | N | P | | R | N | L | S | V | N | H | G | A | S | Y | R | V | I | K | K |
| ABE2.9 | W | R | H | N | P | | R | N | L | S | V | N | H | G | A | S | Y | R | V | I | K | K |
| ABE2.10 | W | R | H | N | P | | R | N | L | S | V | N | H | G | A | S | Y | R | V | I | K | K |
| ABE2.11 | W | R | H | N | P | | R | N | L | S | V | N | H | G | A | S | Y | R | V | I | K | K |
| ABE2.12 | W | R | H | N | P | | R | N | L | S | V | N | H | G | A | S | Y | R | V | I | K | K |
| ABE3.1 | W | R | H | N | P | | R | N | F | S | V | N | Y | G | A | S | Y | R | V | F | K | K |
| ABE3.2 | W | R | H | N | P | | R | N | F | S | V | N | Y | G | A | S | Y | R | V | F | K | K |
| ABE3.3 | W | R | H | N | P | | R | N | F | S | V | N | Y | G | A | S | Y | R | V | F | K | K |
| ABE3.4 | W | R | H | N | P | | R | N | F | S | V | N | Y | G | A | S | Y | R | V | F | K | K |
| ABE3.5 | W | R | H | N | P | | R | N | F | S | V | N | Y | G | A | S | Y | R | V | F | K | K |
| ABE3.6 | W | R | H | N | P | | R | N | F | S | V | N | Y | G | A | S | Y | R | V | F | K | K |
| ABE3.7 | W | R | H | N | P | | R | N | F | S | V | N | Y | G | A | S | Y | R | V | F | K | K |
| ABE3.8 | W | R | H | N | P | | R | N | F | S | V | N | Y | G | A | S | Y | R | V | F | K | K |
| ABE4.1 | W | R | H | N | P | | R | N | L | S | V | N | H | G | N | S | Y | R | V | I | K | K |
| ABE4.2 | W | G | H | N | P | | R | N | L | S | V | N | H | G | N | S | Y | R | V | I | K | K |
| ABE4.3 | W | R | H | N | P | | R | N | F | S | V | N | Y | G | N | S | Y | R | V | F | K | K |
| ABE5.1 | W | R | L | N | P | | L | N | F | S | V | N | Y | G | A | C | Y | R | V | F | N | K |
| ABE5.2 | W | R | H | S | P | | R | N | F | S | V | N | Y | G | A | S | Y | R | V | F | K | T |
| ABE5.3 | W | R | L | N | P | | L | N | I | S | V | N | Y | G | A | C | Y | R | V | F | N | K |
| ABE5.4 | W | R | H | S | P | | R | N | F | S | V | N | Y | G | A | S | Y | R | V | F | K | T |
| ABE5.5 | W | R | L | N | P | | L | N | F | S | V | N | Y | G | A | C | Y | R | V | F | N | K |
| ABE5.6 | W | R | L | N | P | | L | N | F | S | V | N | Y | G | A | C | Y | R | V | F | N | K |
| ABE5.7 | W | R | L | N | P | | L | N | F | S | V | N | Y | G | A | C | Y | R | V | F | N | K |
| ABE5.8 | W | R | L | N | P | | L | N | F | S | V | N | Y | G | A | C | Y | R | V | F | N | K |
| ABE5.9 | W | R | L | N | P | | L | N | F | S | V | N | Y | G | A | C | Y | R | V | F | N | K |
| ABE5.10 | W | R | L | N | P | | L | N | F | S | V | N | Y | G | A | C | Y | R | V | F | N | K |
| ABE5.11 | W | R | L | N | P | | L | N | F | S | V | N | Y | G | A | C | Y | R | V | F | N | K |
| ABE5.12 | W | R | L | N | P | | L | N | F | S | V | N | Y | G | A | C | Y | R | V | F | N | K |
| ABE5.13 | W | R | H | N | P | | L | D | F | S | V | N | Y | A | A | S | Y | R | V | F | K | K |
| ABE5.14 | W | R | H | N | S | | L | N | F | C | V | N | Y | G | A | S | Y | R | V | F | K | K |
| ABE6.1 | W | R | H | N | S | | L | N | F | S | V | N | Y | G | N | S | Y | R | V | F | K | K |
| ABE6.2 | W | R | H | N | T | V | L | N | F | S | V | N | Y | G | N | S | Y | R | V | F | N | K |
| ABE6.3 | W | R | L | N | S | | L | N | F | S | V | N | Y | G | A | C | Y | R | V | F | N | K |
| ABE6.4 | W | R | L | N | S | | L | N | F | S | V | N | Y | G | N | C | Y | R | V | F | N | K |
| ABE6.5 | W | R | L | N | T | V | L | N | F | S | V | N | Y | G | A | C | Y | R | V | F | N | K |
| ABE6.6 | W | R | L | N | T | V | L | N | F | S | V | N | Y | G | N | C | Y | R | V | F | N | K |
| ABE7.1 | W | R | L | N | A | | L | N | F | S | V | N | Y | G | A | C | Y | R | V | F | N | K |
| ABE7.2 | W | R | L | N | A | | L | N | F | S | V | N | Y | G | N | C | Y | R | V | F | N | K |
| ABE7.3 | L | R | L | N | A | | L | N | F | S | V | N | Y | G | A | C | Y | R | V | F | N | K |
| ABE7.4 | R | R | L | N | A | | L | N | F | S | V | N | Y | G | A | C | Y | R | V | F | N | K |
| ABE7.5 | W | R | L | N | A | | L | N | F | S | V | N | Y | G | A | C | Y | H | V | F | N | K |
| ABE7.6 | W | R | L | N | A | | L | N | I | S | V | N | Y | G | A | C | Y | P | V | F | N | K |
| ABE7.7 | L | R | L | N | A | | L | N | F | S | V | N | Y | G | A | C | Y | P | V | F | N | K |
| ABE7.8 | L | R | L | N | A | | L | N | F | S | V | N | Y | G | N | C | Y | R | V | F | N | K |
| ABE7.9 | L | R | L | N | A | | L | N | F | S | V | N | Y | G | N | C | Y | P | V | F | N | K |
| ABE7.10 | R | R | L | N | A | | L | N | F | S | V | N | Y | G | A | C | Y | P | V | F | N | K |

[0669] In some embodiments, the base editor is an eighth generation ABE (ABE8). In some embodiments, the ABE8 contains a TadA*8 variant. In some embodiments, the ABE8 has a monomeric construct containing a TadA*8 variant (“ABE8.x-m”). In some embodiments, the ABE8 is ABE8.1-m, which has a monomeric construct containing TadA*7.10 with a Y147T mutation (TadA*8.1). In some embodiments, the ABE8 is ABE8.2-m, which has a monomeric construct containing TadA*7.10 with a Y147R mutation (TadA*8.2). In some embodiments, the ABE8 is ABE8.3-m, which has a monomeric construct containing TadA*7.10 with a Q154S mutation (TadA*8.3). In some embodiments, the ABE8 is ABE8.4-m, which has a monomeric construct containing TadA*7.10 with a Y123H mutation (TadA*8.4). In some embodiments, the ABE8 is ABE8.5-m, which has a monomeric construct containing TadA*7.10 with a V82S mutation (TadA*8.5). In some embodiments, the ABE8 is ABE8.6-m, which has a monomeric construct containing TadA*7.10 with a T166R mutation (TadA*8.6). In some embodiments, the ABE8 is ABE8.7-m, which has a monomeric construct containing TadA*7.10 with a Q154R mutation (TadA*8.7). In some embodiments, the ABE8 is ABE8.8-m, which has a monomeric construct containing TadA*7.10 with Y147R, Q154R, and Y123H mutations (TadA*8.8). In some embodiments, the ABE8 is ABE8.9-m, which has a monomeric construct containing TadA*7.10 with Y147R, Q154R and I76Y mutations (TadA*8.9). In some embodiments, the ABE8 is ABE8.10-m, which has a monomeric construct containing TadA*7.10 with Y147R, Q154R, and T166R mutations (TadA*8.10). In some embodiments, the ABE8 is ABE8.11-m, which has a monomeric construct containing TadA*7.10 with Y147T and Q154R mutations (TadA*8.11). In some embodiments, the ABE8 is ABE8.12-m, which has a monomeric construct containing TadA*7.10 with Y147T and Q154S mutations (TadA*8.12).

[0670] In some embodiments, the ABE8 is ABE8.13-m, which has a monomeric construct containing TadA*7.10 with Y123H (Y123H reverted from H123Y), Y147R, Q154R and I76Y mutations (TadA*8.13). In some embodiments, the ABE8 is ABE8.14-m, which has a monomeric construct containing TadA*7.10 with I76Y and V82S mutations (TadA*8.14). In some embodiments, the ABE8 is ABE8.15-m, which has a monomeric construct containing TadA*7.10 with V82S and Y147R mutations (TadA*8.15). In some embodiments, the ABE8 is ABE8.16-m, which has a monomeric construct containing TadA*7.10 with V82S, Y123H (Y123H reverted from H123Y) and Y147R mutations (TadA*8.16). In some embodiments, the ABE8 is ABE8.17-m, which has a monomeric construct containing TadA*7.10 with V82S and Q154R mutations (TadA*8.17). In some embodiments, the ABE8 is ABE8.18-m, which has a monomeric construct containing TadA*7.10 with V82S, Y123H (Y123H reverted from H123Y) and Q154R mutations (TadA*8.18). In some embodiments, the ABE8 is ABE8.19-m, which has a monomeric construct containing TadA*7.10 with V82S, Y123H (Y123H reverted from H123Y), Y147R and Q154R mutations (TadA*8.19). In some embodiments, the ABE8 is ABE8.20-m, which has a monomeric construct containing TadA*7.10 with I76Y, V82S, Y123H (Y123H reverted from H123Y), Y147R and Q154R mutations (TadA*8.20). In some embodiments, the ABE8 is ABE8.21-m, which has a monomeric construct containing TadA*7.10 with Y147R and Q154S mutations (TadA*8.21). In some embodiments, the ABE8 is ABE8.22-m, which has a monomeric construct containing TadA*7.10 with V82S and Q154S mutations (TadA*8.22). In some embodiments, the ABE8 is ABE8.23-m, which has a monomeric construct containing TadA*7.10 with V82S and Y123H (Y123H reverted from H123Y) mutations (TadA*8.23). In some embodiments, the ABE8 is ABE8.24-m, which has a monomeric construct containing TadA*7.10 with V82S, Y123H (Y123H reverted from H123Y), and Y147T mutations (TadA*8.24).

[0671] In some embodiments, the ABE8 has a heterodimeric construct containing wild-type E. coli TadA fused to a TadA*8 variant (“ABE8.x-d”). In some embodiments, the ABE8 is ABE8.1-d, which has a heterodimeric construct containing wild-type E. coli TadA fused to TadA*7.10 with a Y147T mutation (TadA*8.1). In some embodiments, the ABE8 is ABE8.2-d, which has a heterodimeric construct containing wild-type E. coli TadA fused to TadA*7.10 with a Y147R mutation (TadA*8.2). In some embodiments, the ABE8 is ABE8.3-d, which has a heterodimeric construct containing wild-type E. coli TadA fused to TadA*7.10 with a Q154S mutation (TadA*8.3). In some embodiments, the ABE8 is ABE8.4-d, which has a heterodimeric construct containing wild-type E. coli TadA fused to TadA*7.10 with a Y123H mutation (TadA*8.4). In some embodiments, the ABE8 is ABE8.5-d, which has a heterodimeric construct containing wild-type E. coli TadA fused to TadA*7.10 with a V82S mutation (TadA*8.5). In some embodiments, the ABE8 is ABE8.6-d, which has a heterodimeric construct containing wild-type E. coli TadA fused to TadA*7.10 with a T166R mutation (TadA*8.6). In some embodiments, the ABE8 is ABE8.7-d, which has a heterodimeric construct containing wild-type E. coli TadA fused to TadA*7.10 with a Q154R mutation (TadA*8.7). In some embodiments, the ABE8 is ABE8.8-d, which has a heterodimeric construct containing wild-type E. coli TadA fused to TadA*7.10 with Y147R, Q154R, and Y123H mutations (TadA*8.8). In some embodiments, the ABE8 is ABE8.9-d, which has a heterodimeric construct containing wild-type E. coli TadA fused to TadA*7.10 with Y147R, Q154R and 176Y mutations (TadA*8.9). In some embodiments, the ABE8 is ABE8.10-d, which has a heterodimeric construct containing wild-type E. coli TadA fused to TadA*7.10 with Y147R, Q154R, and T166R mutations (TadA*8.10). In some embodiments, the ABE8 is ABE8.11-d, which has a heterodimeric construct containing wild-type E. coli TadA fused to TadA*7.10 with Y147T and Q154R mutations (TadA*8.11). In some embodiments, the ABE8 is ABE8.12-d, which has heterodimeric construct containing wild-type E. coli TadA fused to TadA*7.10 with Y147T and Q154S mutations (TadA*8.12). In some embodiments, the ABE8 is ABE8.13-d, which has a heterodimeric construct containing wild-type E. coli TadA fused to TadA*7.10 with Y123H (Y123H reverted from H123Y), Y147R, Q154R and I76Y mutations (TadA*8.13). In some embodiments, the ABE8 is ABE8.14-d, which has a heterodimeric construct containing wild-type E. coli TadA fused to TadA*7.10 with 176Y and V82S mutations (TadA*8.14). In some embodiments, the ABE8 is ABE8.15-d, which has a heterodimeric construct containing wild-type E. coli TadA fused to TadA*7.10 with V82S and Y147R mutations (TadA*8.15). In some embodiments, the ABE8 is ABE8.16-d, which has a heterodimeric construct containing wild-type E. coli TadA fused to TadA*7.10 with V82S, Y123H (Y123H reverted from H123Y) and Y147R mutations (TadA*8.16). In some embodiments, the ABE8 is ABE8.17-d, which has a heterodimeric construct containing wild-type E. coli TadA fused to TadA*7.10 with V82S and Q154R mutations (TadA*8.17). In some embodiments, the ABE8 is ABE8.18-d, which has a heterodimeric construct containing wild-type E. coli TadA fused to TadA*7.10 with V82S, Y123H (Y123H reverted from H123Y) and Q154R mutations (TadA*8.18). In some embodiments, the ABE8 is ABE8.19-d, which has a heterodimeric construct containing wild-type E. coli TadA fused to TadA*7.10 with V82S, Y123H (Y123H reverted from H123Y), Y147R and Q154R mutations (TadA*8.19). In some embodiments, the ABE8 is ABE8.20-d, which has a heterodimeric construct containing wild-type E. coli TadA fused to TadA*7.10 with I76Y, V82S, Y123H (Y123H reverted from H123Y), Y147R and Q154R mutations (TadA*8.20). In some embodiments, the ABE8 is ABE8.21-d, which has a heterodimeric construct containing wild-type E. coli TadA fused to TadA*7.10 with Y147R and Q154S mutations (TadA*8.21). In some embodiments, the ABE8 is ABE8.22-d, which has a heterodimeric construct containing wild-type E. coli TadA fused to TadA*7.10 with V82S and Q154S mutations (TadA*8.22). In some embodiments, the ABE8 is ABE8.23-d, which has a heterodimeric construct containing wild-type E. coli TadA fused to TadA*7.10 with V82S and Y123H (Y123H reverted from H123Y) mutations (TadA*8.23). In some embodiments, the ABE8 is ABE8.24-d, which has a heterodimeric construct containing wild-type E. coli TadA fused to TadA*7.10 with V82S, Y123H (Y123H reverted from H123Y), and Y147T mutations (TadA*8.24).

[0672] In some embodiments, the ABE8 has a heterodimeric construct containing TadA*7.10 fused to a TadA*8 variant (“ABE8.x-7”). In some embodiments, the ABE8 is ABE8.1-7, which has a heterodimeric construct containing TadA*7.10 fused to TadA*7.10 with a Y147T mutation (TadA*8.1). In some embodiments, the ABE8 is ABE8.2-7, which has a heterodimeric construct containing TadA*7.10 fused to TadA*7.10 with a Y147R mutation (TadA*8.2). In some embodiments, the ABE8 is ABE8.3-7, which has a heterodimeric construct containing TadA*7.10 fused to TadA*7.10 with a Q154S mutation (TadA*8.3). In some embodiments, the ABE8 is ABE8.4-7, which has a heterodimeric construct containing TadA*7.10 fused to TadA*7.10 with a Y123H mutation (TadA*8.4). In some embodiments, the ABE8 is ABE8.5-7, which has a heterodimeric construct containing TadA*7.10 fused to TadA*7.10 with a V82S mutation (TadA*8.5). In some embodiments, the ABE8 is ABE8.6-7, which has a heterodimeric construct containing TadA*7.10 fused to TadA*7.10 with a T166R mutation (TadA*8.6). In some embodiments, the ABE8 is ABE8.7-7, which has a heterodimeric construct containing TadA*7.10 fused to TadA*7.10 with a Q154R mutation (TadA*8.7). In some embodiments, the ABE8 is ABE8.8-7, which has a heterodimeric construct containing TadA*7.10 fused to TadA*7.10 with Y147R, Q154R, and Y123H mutations (TadA*8.8). In some embodiments, the ABE8 is ABE8.9-7, which has a heterodimeric construct containing TadA*7.10 fused to TadA*7.10 with Y147R, Q154R and 176Y mutations (TadA*8.9). In some embodiments, the ABE8 is ABE8.10-7, which has a heterodimeric construct containing TadA*7.10 fused to TadA*7.10 with Y147R, Q154R, and T166R mutations (TadA*8.10). In some embodiments, the ABE8 is ABE8.11-7, which has a heterodimeric construct containing TadA*7.10 fused to TadA*7.10 with Y147T and Q154R mutations (TadA*8.11). In some embodiments, the ABE8 is ABE8.12-7, which has a heterodimeric construct containing TadA*7.10 fused to TadA*7.10 with Y147T and Q154S mutations (TadA*8.12). In some embodiments, the ABE8 is ABE8.13-7, which has a heterodimeric construct containing TadA*7.10 fused to TadA*7.10 with Y123H (Y123H reverted from H123Y), Y147R, Q154R and 176Y mutations (TadA*8.13). In some embodiments, the ABE8 is ABE8.14-7, which has a heterodimeric construct containing TadA*7.10 fused to TadA*7.10 with 176Y and V82S mutations (TadA*8.14). In some embodiments, the ABE8 is ABE8.15-7, which has a heterodimeric construct containing TadA*7.10 fused to TadA*7.10 with V82S and Y147R mutations (TadA*8.15). In some embodiments, the ABE8 is ABE8.16-7, which has a heterodimeric construct containing TadA*7.10 fused to TadA*7.10 with V82S, Y123H (Y123H reverted from H123Y) and Y147R mutations (TadA*8.16). In some embodiments, the ABE8 is ABE8.17-7, which has a heterodimeric construct containing TadA*7.10 fused to TadA*7.10 with V82S and Q154R mutations (TadA*8.17). In some embodiments, the ABE8 is ABE8.18-7, which has a heterodimeric construct containing TadA*7.10 fused to TadA*7.10 with V82S, Y123H (Y123H reverted from H123Y) and Q154R mutations (TadA*8.18). In some embodiments, the ABE8 is ABE8.19-7, which has a heterodimeric construct containing TadA*7.10 fused to TadA*7.10 with V82S, Y123H (Y123H reverted from H123Y), Y147R and Q154R mutations (TadA*8.19). In some embodiments, the ABE8 is ABE8.20-7, which has a heterodimeric construct containing TadA*7.10 fused to TadA*7.10 with I76Y, V82S, Y123H (Y123H reverted from H123Y), Y147R and Q154R mutations (TadA*8.20). In some embodiments, the ABE8 is ABE8.21-7, which has a heterodimeric construct containing TadA*7.10 fused to TadA*7.10 with Y147R and Q154S mutations (TadA*8.21). In some embodiments, the ABE8 is ABE8.22-7, which has a heterodimeric construct containing TadA*7.10 fused to TadA*7.10 with V82S and Q154S mutations (TadA*8.22). In some embodiments, the ABE8 is ABE8.23-7, which has a heterodimeric construct containing TadA*7.10 fused to TadA*7.10 with V82S and Y123H (Y123H reverted from H123Y) mutations (TadA*8.23). In some embodiments, the ABE8 is ABE8.24-7, which has a heterodimeric construct containing TadA*7.10 fused to TadA*7.10 with V82S, Y123H (Y123H reverted from H123Y), and Y147T mutations (TadA*8.24).

[1] In some embodiments, the ABE is ABE8.1-m, ABE8.2-m, ABE8.3-m, ABE8.4-m, ABE8.5-m, ABE8.6-m, ABE8.7-m, ABE8.8-m, ABE8.9-m, ABE8.10-m, ABE8.11-m, ABE8.12-m, ABE8.13-m, ABE8.14-m, ABE8.15-m, ABE8.16-m, ABE8.17-m, ABE8.18-m, ABE8.19-m, ABE8.20-m, ABE8.21-m, ABE8.22-m, ABE8.23-m, ABE8.24-m, ABE8.1-d, ABE8.2-d, ABE8.3-d, ABE8.4-d, ABE8.5-d, ABE8.6-d, ABE8.7-d, ABE8.8-d, ABE8.9-d, ABE8.10-d, ABE8.11-d, ABE8.12-d, ABE8.13-d, ABE8.14-d, ABE8.15-d, ABE8.16-d, ABE8.17-d, ABE8.18-d, ABE8.19-d, ABE8.20-d, ABE8.21-d, ABE8.22-d, ABE8.23-d, or ABE8.24-d as shown in Table 12 below.
[2]

TABLE 12
Adenosine Base Editor 8 (ABE8) Variants

| ABE8 | Adenosine Deaminase | Adenosine Deaminase Description |
|---|---|---|
| ABE8.1-m | TadA*8.1 | Monomer_TadA*7.10 + Y147T |
| ABE8.2-m | TadA*8.2 | Monomer_TadA*7.10 + Y147R |
| ABE8.3-m | TadA*8.3 | Monomer_TadA*7.10 + Q154S |
| ABE8.4-m | TadA*8.4 | Monomer_TadA*7.10 + Y123H |
| ABE8.5-m | TadA*8.5 | Monomer_TadA*7.10 + V82S |
| ABE8.6-m | TadA*8.6 | Monomer_TadA*7.10 + T166R |
| ABE8.7-m | TadA*8.7 | Monomer_TadA*7.10 + Q154R |
| ABE8.8-m | TadA*8.8 | Monomer_TadA*7.10 + Y147R_Q154R_Y123H |
| ABE8.9-m | TadA*8.9 | Monomer_TadA*7.10 + Y147R_Q154R_I76Y |
| ABE8.10-m | TadA*8.10 | Monomer_TadA*7.10 + Y147R_Q154R_T166R |
| ABE8.11-m | TadA*8.11 | Monomer_TadA*7.10 + Y147T_Q154R |
| ABE8.12-m | TadA*8.12 | Monomer_TadA*7.10 + Y147T_Q154S |
| ABE8.13-m | TadA*8.13 | Monomer_TadA*7.10 + |
| | | Y123H_Y147R_Q154R_I76Y |
| ABE8.14-m | TadA*8.14 | Monomer_TadA*7.10 + I76Y_V82S |
| ABE8.15-m | TadA*8.15 | Monomer_TadA*7.10 + V82S_Y147R |
| ABE8.16-m | TadA*8.16 | Monomer_TadA*7.10 + V82S_Y123H_Y147R |
| ABE8.17-m | TadA*8.17 | Monomer_TadA*7.10 + V82S_Q154R |
| ABE8.18-m | TadA*8.18 | Monomer_TadA*7.10 + V82S_Y123H_Q154R |
| ABE8.19-m | TadA*8.19 | Monomer_TadA*7.10 + |
| | | V82S_Y123H_Y147R_Q154R |
| ABE8.20-m | TadA*8.20 | Monomer_TadA*7.10 + |
| | | I76Y_V82S_Y123H_Y147R_Q154R |
| ABE8.21-m | TadA*8.21 | Monomer_TadA*7.10 + Y147R_Q154S |
| ABE8.22-m | TadA*8.22 | Monomer_TadA*7.10 + V82S_Q154S |
| ABE8.23-m | TadA*8.23 | Monomer_TadA*7.10 + V82S_Y123H |
| ABE8.24-m | TadA*8.24 | Monomer_TadA*7.10 + V82S_Y123H_Y147T |
| ABE8.1-d | TadA*8.1 | Heterodimer_(WT) + (TadA*7.10 + Y147T) |
| ABE8.2-d | TadA*8.2 | Heterodimer_(WT) + (TadA*7.10 + Y147R) |
| ABE8.3-d | TadA*8.3 | Heterodimer_(WT) + (TadA*7.10 + Q154S) |
| ABE8.4-d | TadA*8.4 | Heterodimer_(WT) + (TadA*7.10 + Y123H) |
| ABE8.5-d | TadA*8.5 | Heterodimer_(WT) + (TadA*7.10 + V82S) |
| ABE8.6-d | TadA*8.6 | Heterodimer_(WT) + (TadA*7.10 + T166R) |
| ABE8.7-d | TadA*8.7 | Heterodimer_(WT) + (TadA*7.10 + Q154R) |
| ABE8.8-d | TadA*8.8 | Heterodimer_(WT) + (TadA*7.10 + |
| | | Y147R_Q154R_Y123H) |
| ABE8.9-d | TadA*8.9 | Heterodimer_(WT) + (TadA*7.10 + |
| | | Y147R_Q154R_I76Y) |
| ABE8.10-d | TadA*8.10 | Heterodimer_(WT) + (TadA*7.10 + |
| | | Y147R_Q154R_T166R) |
| ABE8.11-d | TadA*8.11 | Heterodimer_(WT) + (TadA*7.10 + Y147T_Q154R) |
| ABE8.12-d | TadA*8.12 | Heterodimer_(WT) + (TadA*7.10 + Y147T_Q154S) |
| ABE8.13-d | TadA*8.13 | Heterodimer_(WT) + (TadA*7.10 + |
| | | Y123H_Y147T_Q154R_I76Y) |
| ABE8.14-d | TadA*8.14 | Heterodimer_(WT) + (TadA*7.10 + I76Y_V82S) |
| ABE8.15-d | TadA*8.15 | Heterodimer_(WT) + (TadA*7.10 + V82S_Y147R) |
| ABE8.16-d | TadA*8.16 | Heterodimer_(WT) + (TadA*7.10 + |
| | | V82S_Y123H_Y147R) |
| ABE8.17-d | TadA*8.17 | Heterodimer_(WT) + (TadA*7.10 + V82S_Q154R) |
| ABE8.18-d | TadA*8.18 | Heterodimer_(WT) + (TadA*7.10 + |
| | | V82S_Y123H_Q154R) |
| ABE8.19-d | TadA*8.19 | Heterodimer_(WT) + (TadA*7.10 + |
| | | V82S_Y123H_Y147R_Q154R) |
| ABE8.20-d | TadA*8.20 | Heterodimer_(WT) + (TadA*7.10 + |
| | | I76Y_V82S_Y123H_Y147R_Q154R) |
| ABE8.21-d | TadA*8.21 | Heterodimer_(WT) + (TadA*7.10 + Y147R_Q154S) |
| ABE8.22-d | TadA*8.22 | Heterodimer_(WT) + (TadA*7.10 + V82S_Q154S) |
| ABE8.23-d | TadA*8.23 | Heterodimer_(WT) + (TadA*7.10 + V82S_Y123H) |
| ABE8.24-d | TadA*8.24 | Heterodimer_(WT) + (TadA*7.10 + |
| | | V82S_Y123H_Y147T) |

[0673] In some embodiments, the ABE8 is ABE8a-m, which has a monomeric construct containing TadA*7.10 with R26C, A109S, T111R, D119N, H122N, Y1471D, F149Y, T1661, and D167N mutations (TadA*8a). In some embodiments, the ABE8 is ABE8b-m, which has a monomeric construct containing TadA*7.10 with V88A, A109S, T111R, D119N, H122N, F149Y, T1661, and D167N mutations (TadA*8b). In some embodiments, the ABE8 is ABE8c-m, which has a monomeric construct containing TadA*7.10 with R26C, A109S, T111R, D119N, H122N, F149Y, T1661, and D167N mutations (TadA*8c). In some embodiments, the ABE8 is ABE8d-m, which has a monomeric construct containing TadA*7.10 with V88A, T111R, D119N, and F149Y mutations (TadA*8d). In some embodiments, the ABE8 is ABE8e-m, which has a monomeric construct containing TadA*7.10 with A109S, T111R, D119N, H122N, Y147D, F149Y, T166I, and D167N mutations (TadA*8e).

[0674] In some embodiments, the ABE8 is ABE8a-d, which has a heterodimeric construct containing wild-type E. coli TadA fused to TadA*7.10 with R26C, A109S, T111R, D119, H122N, Y147D, F149Y, T166I, and D167N mutations (TadA*8a). In some embodiments, the ABE8 is ABE8b-d, which has a heterodimeric construct containing wild-type E. coli TadA fused to TadA*7.10 with V88A, A109S, T111R, D119N, H122N, F149Y, T1661, and D167N mutations (TadA*8b). In some embodiments, the ABE8 is ABE8c-d, which has a heterodimeric construct containing wild-type E. coli TadA fused to TadA*7.10 with R26C, A109S, T111R, D119N, H122N, F149Y, T166I, and D167N mutations (TadA*8c). In some embodiments, the ABE8 is ABE8d-d, which has a heterodimeric construct containing wild-type E. coli TadA fused to TadA*7.10 with V88A, T111R, D119N, and F149Y mutations (TadA*8d). In some embodiments, the ABE8 is ABE8e-d, which has a heterodimeric construct containing wild-type E. coli TadA fused to TadA*7.10 with A109S, T111R, D119N, H122N, Y147D, F149Y, T166I, and D167N mutations (TadA*8e).

[0675] In some embodiments, the ABE8 is ABE8a-7, which has a heterodimeric construct containing TadA*7.10 fused to TadA*7.10 with R26C, A109S, T111R, D119, H122N, Y147D, F149Y, T166I, and D167N mutations (TadA*8a). In some embodiments, the ABE8 is ABE8b-7, which has a heterodimeric construct containing TadA*7.10 fused to TadA*7.10 with V88A, A109S, T111R, D119N, H122N, F149Y, T166I, and D167N mutations (TadA*8b). In some embodiments, the ABE8 is ABE8c-7, which has a heterodimeric construct containing TadA*7.10 fused to TadA*7.10 with R26C, A109S, T111R, D119N, H122N, F149Y, T1661, and D167N mutations (TadA*8c). In some embodiments, the ABE8 is ABE8d-7, which has a heterodimeric construct containing TadA*7.10 fused to TadA*7.10 with V88A, T111R, D119N, and F149Y mutations (TadA*8d). In some embodiments, the ABE8 is ABE8e-7, which has a heterodimeric construct containing TadA*7.10 fused to TadA*7.10 with A109S, T111R, D119N, H122N, Y147D, F149Y, T166I, and D167N mutations (TadA*8e).

In some embodiments, the ABE is ABE8a-m, ABE8b-m, ABE8c-m, ABE8d-m, ABE8e-m, ABE8a-d, ABE8b-d, ABE8c-d, ABE8d-d, or ABE8e-d, as shown in Table 13 below. In some embodiments, the ABE is ABE8e-m or ABE8e-d. ABE8e shows efficient adenine base editing activity and low indel formation when used with Cas homologues other than SpCas9, for example, SaCas9, SaCas9-KKH, Cas12a homologues, e.g., LbCas12a, enAs-Cas12a, SpCas9-NG and circularly permuted CP1028-SpCas9 and CP1041-SpCas9. In addition to the mutations shown for ABE8e in Table 13, off-target RNA and DNA editing were reduced by introducing a V106W substitution into the TadA domain (as described in M. Richter et al., 2020, Nature Biotechnology, doi.org/i0.1038/s41587-020-0453-z, the entire contents of which are incorporated by reference herein).

TABLE 13
Additional Adenosine Base Editor 8 Variants. In the table, “monomer” indicates
an ABE comprising a single TadA*7.10 comprising the indicated alterations and
“heterodimer” indicates an ABE comprising a TadA*7.10 comprising the indicated
alterations fused to an E. coli TadA adenosine deaminase.

| ABE8 Base | Adenosine | |
|---|---|---|
| Editor | Deaminase | Adenosine Deaminase Description |
| ABE8a-m | TadA*8a | Monomer_TadA*7.10 + R26C + A109S + T111R + D119N + |
| | | H122N+ Y147D+ F149Y + T166I + D167N |
| ABE8b-m | TadA*8b | Monomer_TadA*7.10 + V88A + A109S + T111R + D119N + |
| | | H122N+ F149Y + T166I + D167N |
| ABE8c-m | TadA*8c | Monomer_TadA*7.10 + R26C + A109S + T111R + D119N + |
| | | H122N + F149Y + T166I + D167N |
| ABE8d-m | TadA*8d | Monomer_TadA*7.10 + V88A + T111R + D119N + F149Y |
| ABE8e-m | TadA*8e | Monomer_TadA*7.10 + A109S + T111R + D119N + H122N + |
| | | Y147D + F149Y + T166I + D167N |
| ABE8a-d | TadA*8a | Heterodimer_(WT) + (TadA*7.10 + R26C + A109S + T111R + |
| | | D119N+ H122N+ Y147D + F149Y + T166I + D167N) |
| ABE8b-d | TadA*8b | Heterodimer_(WT) + (TadA*7.10 + V88A + A109S + T111R + |
| | | D119N+ H122N+ F149Y + T166I + D167N) |
| ABE8c-d | TadA*8c | Heterodimer_(WT) + (TadA*7.10 + R26C + A109S + T111R + |
| | | D119N+ H122N + F149Y + T166I + D167N) |
| ABE8d-d | TadA*8d | Heterodimer_(WT) + (TadA*7.10 + V88A + T111R + D119N + |
| | | F149Y) |
| ABE8e-d | TadA*8e | Heterodimer_(WT) + (TadA*7.10 + A109S + T111R + D119N + |
| | | H122N + Y147D + F149Y + T166I + D167N) |

[0676] In some embodiments, base editors (e.g., ABE8) are generated by cloning an adenosine deaminase variant (e.g., TadA*8) into a scaffold that includes a circular permutant Cas9 (e.g., CP5 or CP6) and a bipartite nuclear localization sequence. In some embodiments, the base editor (e.g., ABE7.9, ABE7.10, or ABE8) is an NGC PAM CP5 variant (S. pyogenes Cas9 or spVRQR Cas9). In some embodiments, the base editor (e.g., ABE7.9, ABE7.10, or ABE8) is an AGA PAM CP5 variant (S. pyogenes Cas9 or spVRQR Cas9). In some embodiments, the base editor (e.g., ABE7.9, ABE7.10, or ABE8) is an NGC PAM CP6 variant (S. pyogenes Cas9 or spVRQR Cas9). In some embodiments, the base editor (e.g. ABE7.9, ABE7.10, or ABE8) is an AGA PAM CP6 variant (S. pyogenes Cas9 or spVRQR Cas9).

[0677] In some embodiments, the ABE has a genotype as shown in Table 14 below.

TABLE 14
Genotypes of ABEs

| | 23 | 26 | 36 | 37 | 48 | 49 | 51 | 72 | 84 | 87 | 105 | 108 | 123 | 125 | 142 | 145 | 147 | 152 | 155 | 156 | 157 | 161 |
|---|---|---|---|---|---|---|---|---|---|---|---|---|---|---|---|---|---|---|---|---|---|---|
| ABE7.9 | L | R | L | N | A | | L | N | F | S | V | N | Y | G | N | C | Y | P | V | F | N | K |
| ABE7.10 | R | R | L | N | A | | L | N | F | S | V | N | Y | G | A | C | Y | P | V | F | N | K |

As shown in Table 15 below, genotypes of 40 ABE8s are described. Residue positions in the evolved E. coli TadA portion of ABE are indicated. Mutational changes in ABE8 are shown when distinct from ABE7.10 mutations. In some embodiments, the ABE has a genotype of one of the ABEs as shown in Table 15 below.

TABLE 15
Residue Identity in Evolved TadA

| | 23 | 36 | 48 | 51 | 76 | 82 | 84 | 106 | 108 | 123 | 146 | 147 | 152 | 154 | 155 | 156 | 157 | 166 |
|---|---|---|---|---|---|---|---|---|---|---|---|---|---|---|---|---|---|---|
| ABE7.10 | R | L | A | L | I | V | F | V | N | Y | C | Y | P | Q | V | F | N | T |
| ABE8.1-m | | | | | | | | | | | | T | | | | | | |
| ABE8.2-m | | | | | | | | | | | | R | | | | | | |
| ABE8.3-m | | | | | | | | | | | | | | S | | | | |
| ABE8.4-m | | | | | | | | | | H | | | | | | | | |
| ABE8.5-m | | | | | | S | | | | | | | | | | | | |
| ABE8.6-m | | | | | | | | | | | | | | | | | | R |
| ABE8.7-m | | | | | | | | | | | | | | R | | | | |
| ABE8.8-m | | | | | | | | | | H | | R | | R | | | | |
| ABE8.9-m | | | | | Y | | | | | | | R | | R | | | | |
| ABE8.10-m | | | | | | | | | | | | R | | R | | | | R |
| ABE8.11-m | | | | | | | | | | | | T | | R | | | | |
| ABE8.12-m | | | | | | | | | | | | T | | S | | | | |
| ABE8.13-m | | | | | Y | | | | | H | | R | | R | | | | |
| ABE8.14-m | | | | | Y | S | | | | | | | | | | | | |
| ABE8.15-m | | | | | | S | | | | | | R | | | | | | |
| ABE8.16-m | | | | | | S | | | | H | | R | | | | | | |
| ABE8.17-m | | | | | | S | | | | | | | | R | | | | |
| ABE8.18-m | | | | | | S | | | | H | | | | R | | | | |
| ABE8.19-m | | | | | | S | | | | H | | R | | R | | | | |
| ABE8.20-m | | | | | Y | S | | | | H | | R | | R | | | | |
| ABE8.21-m | | | | | | | | | | | | R | | S | | | | |
| ABE8.22-m | | | | | | S | | | | | | | | S | | | | |
| ABE8.23-m | | | | | | S | | | | H | | | | | | | | |
| ABE8.24-m | | | | | | S | | | | H | | T | | | | | | |
| ABE8.1-d | | | | | | | | | | | | T | | | | | | |
| ABE8.2-d | | | | | | | | | | | | R | | | | | | |
| ABE8.3-d | | | | | | | | | | | | | | S | | | | |
| ABE8.4-d | | | | | | | | | | H | | | | | | | | |
| ABE8.5-d | | | | | | S | | | | | | | | | | | | |
| ABE8.6-d | | | | | | | | | | | | | | | | | | R |
| ABE8.7-d | | | | | | | | | | | | | | R | | | | |
| ABE8.8-d | | | | | | | | | | H | | R | | R | | | | |
| ABE8.9-d | | | | | Y | | | | | | | R | | R | | | | |
| ABE8.10-d | | | | | | | | | | | | R | | R | | | | R |
| ABE8.11-d | | | | | | | | | | | | T | | R | | | | |
| ABE8.12-d | | | | | | | | | | | | T | | S | | | | |
| ABE8.13-d | | | | | Y | | | | | H | | R | | R | | | | |
| ABE8.14-d | | | | | Y | S | | | | | | | | | | | | |
| ABE8.15-d | | | | | | S | | | | | | R | | | | | | |
| ABE8.16-d | | | | | | S | | | | H | | R | | | | | | |
| ABE8.17-d | | | | | | S | | | | | | | | R | | | | |
| ABE8.18-d | | | | | | S | | | | H | | | | R | | | | |
| ABE8.19-d | | | | | | S | | | | H | | R | | R | | | | |
| ABE8.20-d | | | | | Y | S | | | | H | | R | | R | | | | |
| ABE8.21-d | | | | | | | | | | | | R | | S | | | | |
| ABE8.22-d | | | | | | S | | | | | | | | S | | | | |
| ABE8.23-d | | | | | | S | | | | H | | | | | | | | |
| ABE8.24-d | | | | | | S | | | | H | | T | | | | | | |

[0678] In some embodiments, the base editor is ABE8.1, which comprises or consists essentially of the following sequence or a fragment thereof having adenosine deaminase activity:

ABE8.1_Y147T_CP5_NGC PAM_monomer
(SEQ ID NO: 331)
MSEVEFSHEYWMRHALTLAKRARDEREVPVGAVLVLNNRVIGEGWNRAIG
LHDPTAHAEIMALRQGGLVMQNYRLIDATLYVTFEPCVMCAGAMIHSRIG
RVVFGVRNAKTGAAGSLMDVLHYPGMNHRVEITEGILADECAALLCTFFR
MPRQVFNAQKKAQSSTD
SGGSSGGSSGSETPGTSESATPESSGGSSGGS
EIGKATAKYFFYSNIMNFFKTEITLANGEIRK
RPLIETNGETGEIVWDKGRDFATVRKVLSMPQ
VNIVKKTEVQTGGFSKESILPKRNSDKLIARK
KDWDPKKYGGFMQPTVAYSVLVVAKVEKGKSK
KLKSVKELLGITIMERSSFEKNPIDFLEAKGY
KEVKKDLIIKLPKYSLFELENGRKRMLASAKF
LQKGNELALPSKYVNFLYLASHYEKLKGSPED
NEQKQLFVEQHKHYLDEIIEQISEFSKRVILA
DANLDKVLSAYNKHRDKPIREQAENIIHLFTL
TNLGAPRAFKYFDTTIARKEYRSTKEVLDATL
IHQSITGLYETRIDLSQLGGD
GGSGGSGGSGGSGGSGGSGGMDKKYSIGLAIG
TNSVGWAVITDEYKVPSKKFKVLGNTDRHSIK
KNLIGALLFDSGETAEATRLKRTARRRYTRRK
NRICYLQEIFSNEMAKVDDSFFHRLEESFLVE
EDKKHERHPIFGNIVDEVAYHEKYPTIYHLRK
KLVDSTDKADLRLIYLALAHMIKFRGHFLIEG
DLNPDNSDVDKLFIQLVQTYNQLFEENPINAS
GVDAKAILSARLSKSRRLENLIAQLPGEKKNG
LFGNLIALSLGLTPNFKSNFDLAEDAKLQLSK
DTYDDDLDNLLAQIGDQYADLFLAAKNLSDAI
LLSDILRVNTEITKAPLSASMIKRYDEHHQDL
TLLKALVRQQLPEKYKEIFFDQSKNGYAGYID
GGASQEEFYKFIKPILEKMDGTEELLVKLNRE
DLLRKQRTFDNGSIPHQIHLGELHAILRRQED
FYPFLKDNREKIEKILTFRIPYYVGPLARGNS
RFAWMTRKSEETITPWNFEEVVDKGASAQSFI
ERMTNFDKNLPNEKVLPKHSLLYEYFTVYNEL
TKVKYVTEGMRKPAFLSGEQKKAIVDLLFKTN
RKVTVKQLKEDYFKKIECFDSVEISGVEDRFN
ASLGTYHDLLKIIKDKDFLDNEENEDILEDIV
LTLTLFEDREMIEERLKTYAHLFDDKVMKQLK
RRRYTGWGRLSRKLINGIRDKQSGKTILDFLK
SDGFANRNFMQLIHDDSLTFKEDIQKAQVSGQ
GDSLHEHIANLAGSPAIKKGILQTVKVVDELV
KVMGRHKPENIVIEMARENQTTQKGQKNSRER
MKRIEEGIKELGSQILKEHPVENTQLQNEKLY
LYYLQNGRDMYVDQELDINRLSDYDVDHIVPQ
SFLKDDSIDNKVLTRSDKNRGKSDNVPSEEVV
KKMKNYWRQLLNAKLITQRKFDNLTKAERGGL
SELDKAGFIKRQLVETRQITKHVAQILDSRMN
TKYDENDKLIREVKVITLKSKLVSDFRKDFQF
YKVREINNYHHAHDAYLNAVVGTALIKKYPKL
ESEFVYGDYKVYDVRKMIAKSEQ
EGADKRTADGSEFESPKKKRKV

[0679] In the above sequence, the plain text denotes an adenosine deaminase sequence, bold sequence indicates sequence derived from Cas9, the italicized sequence denotes a linker sequence, and the underlined sequence denotes a bipartite nuclear localization sequence. Other ABE8 sequences are provided in the attached sequence listing (SEQ ID NOs: 332-354).

[0680] In some embodiments, the base editor is a ninth generation ABE (ABE9). In some embodiments, the ABE9 contains a TadA*9 variant. ABE9 base editors include an adenosine deaminase variant comprising an amino acid sequence, which contains alterations relative to an ABE 7*10 reference sequence, as described herein. Exemplary ABE9 variants are listed in Table 16. Details of ABE9 base editors are described in International PCT Application No. PCT/2020/049975, which is incorporated herein by reference for its entirety.

TABLE 16
Adenosine Base Editor 9 (ABE9) Variants. In the table, “monomer” indicates an ABE comprising
a single TadA*7.10 comprising the indicated alterations and
“heterodimer” indicates an ABE comprising a TadA*7.10 comprising the indicated
alterations fused to an E. coli TadA adenosine deaminase.

| ABE9 Description | Alterations |
|---|---|
| ABE9.1_monomer | E25F, V82S, Y123H, T133K, Y147R, Q154R |
| ABE9.2_monomer | E25F, V82S, Y123H, Y147R, Q154R |
| ABE9.3_monomer | V82S, Y123H, P124W, Y147R, Q154R |
| ABE9.4_monomer | L51W, V82S, Y123H, C146R, Y147R, Q154R |
| ABE9.5_monomer | P54C, V82S, Y123H, Y147R, Q154R |
| ABE9.6_monomer | Y73S, V82S, Y123H, Y147R, Q154R |
| ABE9.7_monomer | N38G, V82T, Y123H, Y147R, Q154R |
| ABE9.8_monomer | R23H, V82S, Y123H, Y147R, Q154R |
| ABE9.9_monomer | R21N, V82S, Y123H, Y147R, Q154R |
| ABE9.10_monomer | V82S, Y123H, Y147R, Q154R, A158K |
| ABE9.11_monomer | N72K, V82S, Y123H, D139L, Y147R, Q154R, |
| ABE9.12_monomer | E25F, V82S, Y123H, D139M, Y147R, Q154R |
| ABE9.13_monomer | M70V, V82S, M94V, Y123H, Y147R, Q154R |
| ABE9.14_monomer | Q71M, V82S, Y123H, Y147R, Q154R |
| ABE9.15_heterodimer | E25F, V82S, Y123H, T133K, Y147R, Q154R |
| ABE9.16_heterodimer | E25F, V82S, Y123H, Y147R, Q154R |
| ABE9.17_heterodimer | V82S, Y123H, P124W, Y147R, Q154R |
| ABE9.18_heterodimer | L51W, V82S, Y123H, C146R, Y147R, Q154R |
| ABE9.19_heterodimer | P54C, V82S, Y123H, Y147R, Q154R |
| ABE9.2_heterodimer | Y73S, V82S, Y123H, Y147R, Q154R |
| ABE9.21_heterodimer | N38G, V82T, Y123H, Y147R, Q154R |
| ABE9.22_heterodimer | R23H, V82S, Y123H, Y147R, Q154R |
| ABE9.23_heterodimer | R21N, V82S, Y123H, Y147R, Q154R |
| ABE9.24_heterodimer | V82S, Y123H, Y147R, Q154R, A158K |
| ABE9.25_heterodimer | N72K, V82S, Y123H, D139L, Y147R, Q154R, |
| ABE9.26_heterodimer | E25F, V82S, Y123H, D139M, Y147R, Q154R |
| ABE9.27_heterodimer | M70V, V82S, M94V, Y123H, Y147R, Q154R |
| ABE9.28_heterodimer | Q71M, V82S, Y123H, Y147R, Q154R |
| ABE9.29_monomer | E25F_I76Y_V82S_Y123H_Y147R_Q154R |
| ABE9.30_monomer | I76Y_V82T_Y123H_Y147R_Q154R |
| ABE9.31_monomer | N38G_I76Y_V82S_Y123H_Y147R_Q154R |
| ABE9.32_monomer | N38G_I76Y_V82T_Y123H_Y147R_Q154R |
| ABE9.33_monomer | R23H_I76Y_V82S_Y123H_Y147R_Q154R |
| ABE9.34_monomer | P54C_I76Y_V82S_Y123H_Y147R_Q154R |
| ABE9.35_monomer | R21N_I76Y_V82S_Y123H_Y147R_Q154R |
| ABE9.36_monomer | I76Y_V82S_Y123H_D138M_Y147R_Q154R |
| ABE9.37_monomer | Y72S_I76Y_V82S_Y123H_Y147R_Q154R |
| ABE9.38_heterodimer | E25F_I76Y_V82S_Y123H_Y147R_Q154R |
| ABE9.39_heterodimer | I76Y_V82T_Y123H_Y147R_Q154R |
| ABE9.40_heterodimer | N38G_I76Y_V82S_Y123H_Y147R_Q154R |
| ABE9.41_heterodimer | N38G_I76Y_V82T_Y123H_Y147R_Q154R |
| ABE9.42_heterodimer | R23H_I76Y_V82S_Y123H_Y147R_Q154R |
| ABE9.43_heterodimer | P54C_I76Y_V82S_Y123H_Y147R_Q154R |
| ABE9.44_heterodimer | R21N_I76Y_V82S_Y123H_Y147R_Q154R |
| ABE9.45_heterodimer | I76Y_V82S_Y123H_D138M_Y147R_Q154R |
| ABE9.46_heterodimer | Y72S_I76Y_V82S_Y123H_Y147R_Q154R |
| ABE9.47_monomer | N72K_V82S, Y123H, Y147R, Q154R |
| ABE9.48_monomer | Q71M_V82S, Y123H, Y147R, Q154R |
| ABE9.49_monomer | M70V, V82S, M94V, Y123H, Y147R, Q154R |
| ABE9.50_monomer | V82S, Y123H, T133K, Y147R, Q154R |
| ABE9.51_monomer | V82S, Y123H, T133K, Y147R, Q154R, |
| | A158K |
| ABE9.52_monomer | M70V, Q71M, N72K, V82S, Y123H, Y147R, |
| | Q154R |
| ABE9.53_heterodimer | N72K_V82S, Y123H, Y147R, Q154R |
| ABE9.54_heterodimer | Q71M_V82S, Y123H, Y147R, Q154R |
| ABE9.55_heterodimer | M70V, V82S, M94V, Y123H, Y147R, Q154R |
| ABE9.56_heterodimer | V82S, Y123H, T133K, Y147R, Q154R |
| ABE9.57_heterodimer | V82S, Y123H, T133K, Y147R, Q154R, |
| | A158K |
| ABE9.58_heterodimer | M70V, Q71M, N72K, V82S, Y123H, Y147R, |
| | Q154R |

[0681] In some embodiments, the base editor includes an adenosine deaminase variant comprising an amino acid sequence, which contains alterations relative to an ABE 7*10 reference sequence, as described herein. The term “monomer” as used in Table 16.1 refers to a monomeric form of TadA*7.10 comprising the alterations described. The term “heterodimer” as used in Table 16.1 refers to the specified wild-type E. coli TadA adenosine deaminase fused to a TadA*7.10 comprising the alterations as described.

TABLE 16.1
Adenosine Deaminase Base Editor Variants

| ABE | Adenosine Deaminase | Adenosine Deaminase Description |
|---|---|---|
| ABE-605m | MSP605 | monomer_+TadA*7.10 + V82G + Y147T + Q154S |
| ABE-680m | MSP680 | monomer_TadA*7.10 + I76Y + V82G + Y147T + Q154S |
| ABE-823m | MSP823 | monomer_TadA*7.10 + L36H + V82G + Y147T + Q154S + |
| | | N157K |
| ABE-824m | MSP824 | monomer_TadA*7.10 + V82G + Y147D + F149Y + Q154S + |
| | | D167N |
| ABE-825m | MSP825 | monomer_TadA*7.10+ L36H + V82G + Y147D + F149Y + |
| | | Q154S + N157K + D167N |
| ABE-827m | MSP827 | monomer_TadA*7.10 + L36H + 176Y + V82G + Y147T + |
| | | Q154S + N157K |
| ABE-828m | MSP828 | monomer_TadA*7.10 + I76Y + V82G + Y147D + F149Y + |
| | | Q154S + D167N |
| ABE-829m | MSP829 | monomer_TadA*7.10 + L36H + I76Y + V82G + Y147D + |
| | | F149Y + Q154S + N157K + D167N |
| ABE-605d | MSP605 | heterodimer_(WT)+(TadA*7.10 + V82G + Y147T + Q154S) |
| ABE-680d | MSP680 | heterodimer_(WT)+(TadA*7.10 + I76Y + V82G + Y147T + |
| | | Q154S) |
| ABE-823d | MSP823 | heterodimer_(WT)+(TadA*7.10 + L36H + V82G + Y147T + |
| | | Q154S + N157K) |
| ABE-824d | MSP824 | heterodimer_(WT)+(TadA*7.10+ V82G + Y147D + F149Y + |
| | | Q154S + D167N) |
| ABE-825d | MSP825 | heterodimer_(WT)+(TadA*7.10 + L36H + V82G + Y147D + |
| | | F149Y + Q154S + N157K + D167N) |
| ABE-827d | MSP827 | heterodimer_(WT)+(TadA*7.10 + L36H + I76Y + V82G + |
| | | Y147T + Q154S + N157K) |
| ABE-828d | MSP828 | heterodimer_(WT)+(TadA*7.10 + 176Y + V82G + Y147D + |
| | | F149Y + Q154S + D167N) |
| ABE-829d | MSP829 | heterodimer (WT)+(TadA*7.10 + L36H + 176Y + V82G + |
| | | Y147D + F149Y + Q154S + N157K + D167N) |

[0682] In some embodiments, the base editor comprises a domain comprising all or a portion of a uracil glycosylase inhibitor (UGI). In some embodiments, the base editor comprises a domain comprising all or a portion of a nucleic acid polymerase. In some embodiments, a base editor can comprise as a domain all or a portion of a nucleic acid polymerase (NAP). For example, a base editor can comprise all or a portion of a eukaryotic NAP. In some embodiments, a NAP or portion thereof incorporated into a base editor is a DNA polymerase. In some embodiments, a NAP or portion thereof incorporated into a base editor has translesion polymerase activity. In some embodiments, a NAP or portion thereof incorporated into a base editor is a translesion DNA polymerase. In some embodiments, a NAP or portion thereof incorporated into a base editor is a Rev7, Rev1 complex, polymerase iota, polymerase kappa, or polymerase eta. In some embodiments, a NAP or portion thereof incorporated into a base editor is a eukaryotic polymerase alpha, beta, gamma, delta, epsilon, gamma, eta, iota, kappa, lambda, mu, or nu component. In some embodiments, a NAP or portion thereof incorporated into a base editor comprises an amino acid sequence that is at least 75%, 80%, 85%, 90%, 95%, 96%, 97%, 98%, 99%, or 99.5% identical to a nucleic acid polymerase (e.g., a translesion DNA polymerase). In some embodiments, a nucleic acid polymerase or portion thereof incorporated into a base editor is a translesion DNA polymerase.

[0683] In some embodiments, a domain of the base editor can comprise multiple domains. For example, the base editor comprising a polynucleotide programmable nucleotide binding domain derived from Cas9 can comprise a REC lobe and an NUC lobe corresponding to the REC lobe and NUC lobe of a wild-type or natural Cas9. In another example, the base editor can comprise one or more of a RuvCI domain, BH domain, REC1 domain, REC2 domain, RuvCII domain, L1 domain, HNH domain, L2 domain, RuvCIII domain, WED domain, TOPO domain or CTD domain. In some embodiments, one or more domains of the base editor comprise a mutation (e.g., substitution, insertion, deletion) relative to a wild-type version of a polypeptide comprising the domain. For example, an HNH domain of a polynucleotide programmable DNA binding domain can comprise an H840A substitution. In another example, a RuvCI domain of a polynucleotide programmable DNA binding domain can comprise a D10A substitution.

[0684] Different domains (e.g., adjacent domains) of the base editor disclosed herein can be connected to each other with or without the use of one or more linker domains (e.g., an XTEN linker domain). In some embodiments, a linker domain can be a bond (e.g., covalent bond), chemical group, or a molecule linking two molecules or moieties, e.g., two domains of a fusion protein, such as, for example, a first domain (e.g., Cas9-derived domain) and a second domain (e.g., an adenosine deaminase domain or a cytidine deaminase domain). In some embodiments, a linker is a covalent bond (e.g., a carbon-carbon bond, disulfide bond, carbon-hetero atom bond, etc.). In certain embodiments, a linker is a carbon nitrogen bond of an amide linkage. In certain embodiments, a linker is a cyclic or acyclic, substituted or unsubstituted, branched or unbranched aliphatic or heteroaliphatic linker. In certain embodiments, a linker is polymeric (e.g., polyethylene, polyethylene glycol, polyamide, polyester, etc.). In certain embodiments, a linker comprises a monomer, dimer, or polymer of aminoalkanoic acid. In some embodiments, a linker comprises an aminoalkanoic acid (e.g., glycine, ethanoic acid, alanine, beta-alanine, 3-aminopropanoic acid, 4-aminobutanoic acid, 5-pentanoic acid, etc.). In some embodiments, a linker comprises a monomer, dimer, or polymer of aminohexanoic acid (Ahx). In certain embodiments, a linker is based on a carbocyclic moiety (e.g., cyclopentane, cyclohexane). In other embodiments, a linker comprises a polyethylene glycol moiety (PEG). In certain embodiments, a linker comprises an aryl or heteroaryl moiety. In certain embodiments, the linker is based on a phenyl ring. A linker can include functionalized moieties to facilitate attachment of a nucleophile (e.g., thiol, amino) from the peptide to the linker. Any electrophile can be used as part of the linker. Exemplary electrophiles include, but are not limited to, activated esters, activated amides, Michael acceptors, alkyl halides, aryl halides, acyl halides, and isothiocyanates. In some embodiments, a linker joins a gRNA binding domain of an RNA-programmable nuclease, including a Cas9 nuclease domain, and the catalytic domain of a nucleic acid editing protein. In some embodiments, a linker joins a dCas9 and a second domain (e.g., UGI, etc.).

### Linkers

[0685] In certain embodiments, linkers may be used to link any of the peptides or peptide domains of the invention. The linker may be as simple as a covalent bond, or it may be a polymeric linker many atoms in length. In certain embodiments, the linker is a polypeptide or based on amino acids. In other embodiments, the linker is not peptide-like. In certain embodiments, the linker is a covalent bond (e.g., a carbon-carbon bond, disulfide bond, carbon-heteroatom bond, etc.). In certain embodiments, the linker is a carbon-nitrogen bond of an amide linkage. In certain embodiments, the linker is a cyclic or acyclic, substituted or unsubstituted, branched or unbranched aliphatic or heteroaliphatic linker. In certain embodiments, the linker is polymeric (e.g., polyethylene, polyethylene glycol, polyamide, polyester, etc.). In certain embodiments, the linker comprises a monomer, dimer, or polymer of aminoalkanoic acid. In certain embodiments, the linker comprises an aminoalkanoic acid (e.g., glycine, ethanoic acid, alanine, beta-alanine, 3-aminopropanoic acid, 4-aminobutanoic acid, 5-pentanoic acid, etc.). In certain embodiments, the linker comprises a monomer, dimer, or polymer of aminohexanoic acid (Ahx). In certain embodiments, the linker is based on a carbocyclic moiety (e.g., cyclopentane, cyclohexane). In other embodiments, the linker comprises a polyethylene glycol moiety (PEG). In other embodiments, the linker comprises amino acids. In certain embodiments, the linker comprises a peptide. In certain embodiments, the linker comprises an aryl or heteroaryl moiety. In certain embodiments, the linker is based on a phenyl ring. The linker may include functionalized moieties to facilitate attachment of a nucleophile (e.g., thiol, amino) from the peptide to the linker. Any electrophile may be used as part of the linker. Exemplary electrophiles include, but are not limited to, activated esters, activated amides, Michael acceptors, alkyl halides, aryl halides, acyl halides, and isothiocyanates.

[0686] Typically, a linker is positioned between, or flanked by, two groups, molecules, or other moieties and connected to each one via a covalent bond, thus connecting the two. In some embodiments, a linker is an amino acid or a plurality of amino acids (e.g., a peptide or protein). In some embodiments, a linker is an organic molecule, group, polymer, or chemical moiety. In some embodiments, a linker is 2-100 amino acids in length, for example, 2, 3, 4, 5, 6, 7, 8, 9, 10, 11, 12, 13, 14, 15, 16, 17, 18, 19, 20, 21, 22, 23, 24, 25, 26, 27, 28, 29, 30, 30-35, 35-40, 40-45, 45-50, 50-60, 60-70, 70-80, 80-90, 90-100, 100-150, or 150-200 amino acids in length. In some embodiments, the linker is about 3 to about 104 (e.g., 5, 6, 7, 8, 9, 10, 11, 12, 13, 14, 15, 16, 17, 18, 19, 20, 21, 22, 23, 24, 25, 26, 27, 28, 29, 30, 31, 32, 33, 34, 35, 36, 37, 38, 39, 40, 41, 42, 43, 44, 45, 46, 47, 48, 49, 50, 55, 60, 65, 70, 75, 80, 85, 90, 95, or 100) amino acids in length. Longer or shorter linkers are also contemplated.

[0687] In some embodiments, any of the fusion proteins provided herein, comprise a cytidine or adenosine deaminase and a Cas9 domain that are fused to each other via a linker. Various linker lengths and flexibilities between the cytidine or adenosine deaminase and the Cas9 domain can be employed (e.g., ranging from very flexible linkers of the form (GGGS)n (SEQ ID NO: 246), (GGGGS)n (SEQ ID NO: 247), and (G)n to more rigid linkers of the form (EAAAK)n (SEQ ID NO: 248), (SGGS)n (SEQ ID NO: 355), SGSETPGTSESATPES (SEQ ID NO: 249) (see, e.g., Guilinger J P, et al. Fusion of catalytically inactive Cas9 to FokI nuclease improves the specificity of genome modification. Nat. Biotechnol. 2014; 32(6): 577-82; the entire contents are incorporated herein by reference) and (XP)n) in order to achieve the optimal length for activity for the cytidine or adenosine deaminase nucleobase editor. In some embodiments, n is 1, 2, 3, 4, 5, 6, 7, 8, 9, 10, 11, 12, 13, 14, or 15. In some embodiments, the linker comprises a (GGS)n motif, wherein n is 1, 3, or 7. In some embodiments, cytidine deaminase or adenosine deaminase and the Cas9 domain of any of the fusion proteins provided herein are fused via a linker comprising the amino acid sequence SGSETPGTSESATPES (SEQ ID NO: 249), which can also be referred to as the XTEN linker.

[0688] In some embodiments, the domains of the base editor are fused via a linker that comprises the amino acid sequence of:

(SEQ ID NO: 356)
SGGSSGSETPGTSESATPESSGGS,
(SEQ ID NO: 357)
SGGSSGGSSGSETPGTSESATPESSGGSSGGS,
or
(SEQ ID NO: 358)
GGSGGSPGSPAGSPTSTEEGTSESATPESGPGTSTEPSEGSAPGSPAGSP
TSTEEGTSTEPSEGSAPGTSTEPSEGSAPGTSESATPESGPGSEPATSGG
SGGS.

[0689] In some embodiments, domains of the base editor are fused via a linker comprising the amino acid sequence SGSETPGTSESATPES (SEQ ID NO: 249), which may also be referred to as the XTEN linker. In some embodiments, a linker comprises the amino acid sequence SGGS. In some embodiments, the linker is 24 amino acids in length. In some embodiments, the linker comprises the amino acid sequence SGGSSGGSSGSETPGTSESATPES (SEQ ID NO: 359). In some embodiments, the linker is 40 amino acids in length. In some embodiments, the linker comprises the amino acid sequence: SGGSSGGSSGSETPGTSESATPESSGGSSGGSSGGSSGGS (SEQ ID NO: 360). In some embodiments, the linker is 64 amino acids in length. In some embodiments, the linker comprises the amino acid sequence: SGGSSGGSSGSETPGTSESATPESSGGSSGGSSGGSSGGSSGSETPGTSESATPESSGGSSGGS (SEQ ID NO: 361). In some embodiments, the linker is 92 amino acids in length. In some embodiments, the linker comprises the amino acid sequence:

(SEQ ID NO: 362)
PGSPAGSPTSTEEGTSESATPESGPGTSTEPSEGSAPGSPAGSPTSTEEG
TSTEPSEGSAPGTSTEPSEGSAPGTSESATPESGPGSEPATS.

[0690] In some embodiments, a linker comprises a plurality of proline residues and is 5-21, 5-14, 5-9, 5-7 amino acids in length, e.g., PAPAP (SEQ ID NO: 363), PAPAPA (SEQ ID NO: 364), PAPAPAP (SEQ ID NO: 365), PAPAPAPA (SEQ ID NO: 366), P(AP)4 (SEQ ID NO: 367), P(AP)7 (SEQ ID NO: 368), P(AP)10 (SEQ ID NO: 369) (see, e.g., Tan J, Zhang F, Karcher D, Bock R. Engineering of high-precision base editors for site-specific single nucleotide replacement. Nat Commun. 2019 Jan. 25; 10(1):439; the entire contents are incorporated herein by reference). Such proline-rich linkers are also termed “rigid” linkers.

[0691] In another embodiment, the base editor system comprises a component (protein) that interacts non-covalently with a deaminase (DNA deaminase), e.g., an adenosine or a cytidine deaminase, and transiently attracts the adenosine or cytidine deaminase to the target nucleobase in a target polynucleotide sequence for specific editing, with minimal or reduced bystander or target-adjacent effects. Such a non-covalent system and method involving deaminase-interacting proteins serves to attract a DNA deaminase to a particular genomic target nucleobase and decouples the events of on-target and target-adjacent editing, thus enhancing the achievement of more precise single base substitution mutations. In an embodiment, the deaminase-interacting protein binds to the deaminase (e.g., adenosine deaminase or cytidine deaminase) without blocking or interfering with the active (catalytic) site of the deaminase from engaging the target nucleobase (e.g., adenosine or cytidine, respectively). Such as system, termed “MagnEdit,” involves interacting proteins tethered to a Cas9 and gRNA complex and can attract a co-expressed adenosine or cytidine deaminase (either exogenous or endogenous) to edit a specific genomic target site, and is described in McCann, J. et al., 2020, “MagnEdit—interacting factors that recruit DNA-editing enzymes to single base targets,” Life-Science-Alliance, Vol. 3, No. 4 (e201900606), (doi 10.26508/Isa.201900606), the contents of which are incorporated by reference herein in their entirety. In an embodiment, the DNA deaminase is an adenosine deaminase variant (e.g., TadA*8) as described herein.

[0692] In another embodiment, a system called “Suntag,” involves non-covalently interacting components used for recruiting protein (e.g., adenosine deaminase or cytidine deaminase) components, or multiple copies thereof, of base editors to polynucleotide target sites to achieve base editing at the site with reduced adjacent target editing, for example, as described in Tanenbaum, M. E. et al., “A protein tagging system for signal amplification in gene expression and fluorescence imaging,” Cell. 2014 Oct. 23; 159(3): 635-646. doi:10.1016/j.cell.2014.09.039; and in Huang, Y.-H. et al., 2017, “DNA epigenome editing using CRISPR-Cas SunTag-directed DNMT3A,” Genome Biol 18: 176. doi:10.1186/s13059-017-1306-z, the contents of each of which are incorporated by reference herein in their entirety. In an embodiment, the DNA deaminase is an adenosine deaminase variant (e.g., TadA*8) as described herein.

Nucleic Acid Programmable DNA Binding Proteins with Guide RNAs

[0693] Provided herein are compositions and methods for base editing in cells. Further provided herein are compositions comprising a guide polynucleic acid sequence, e.g. a guide RNA sequence, or a combination of 2, 3, 4, 5, 6, 7, 8, 9, 10, 11, 12, 13, 14, 15, 16, 17, 18, 19, 20, or more guide RNAs as provided herein. In some embodiments, a composition for base editing as provided herein further comprises a polynucleotide that encodes a base editor, e.g. a C-base editor or an A-base editor. For example, a composition for base editing may comprise a mRNA sequence encoding a BE, a BE4, an ABE, and a combination of one or more guide RNAs as provided. A composition for base editing may comprise a base editor polypeptide and a combination of one or more of any guide RNAs provided herein. Such a composition may be used to effect base editing in a cell through different delivery approaches, for example, electroporation, nucleofection, viral transduction or transfection. In some embodiments, the composition for base editing comprises an mRNA sequence that encodes a base editor and a combination of one or more guide RNA sequences provided herein for electroporation.

[0694] Some aspects of this disclosure provide complexes comprising any of the fusion proteins provided herein, and a guide RNA bound to a nucleic acid programmable DNA binding protein (napDNAbp) domain (e.g., a Cas9 (e.g., a dCas9, a nuclease active Cas9, or a Cas9 nickase) or Cas12) of the fusion protein. These complexes are also termed ribonucleoproteins (RNPs). In some embodiments, the guide nucleic acid (e.g., guide RNA) is from 15-100 nucleotides long and comprises a sequence of at least 10 contiguous nucleotides that is complementary to a target sequence. In some embodiments, the guide RNA is 15, 16, 17, 18, 19, 20, 21, 22, 23, 24, 25, 26, 27, 28, 29, 30, 31, 32, 33, 34, 35, 36, 37, 38, 39, 40, 41, 42, 43, 44, 45, 46, 47, 48, 49, or 50 nucleotides long. In some embodiments, the guide RNA comprises a sequence of 15, 16, 17, 18, 19, 20, 21, 22, 23, 24, 25, 26, 27, 28, 29, 30, 31, 32, 33, 34, 35, 36, 37, 38, 39, or 40 contiguous nucleotides that is complementary to a target sequence. In some embodiments, the target sequence is a DNA sequence. In some embodiments, the target sequence is an RNA sequence. In some embodiments, the target sequence is a sequence in the genome of a bacteria, yeast, fungi, insect, plant, or animal. In some embodiments, the target sequence is a sequence in the genome of a human. In some embodiments, the 3′ end of the target sequence is immediately adjacent to a canonical PAM sequence (NGG). In some embodiments, the 3′ end of the target sequence is immediately adjacent to a non-canonical PAM sequence (e.g., a sequence listed in Table 7 or 5′-NAA-3′). In some embodiments, the guide nucleic acid (e.g., guide RNA) is complementary to a sequence in a gene of interest (e.g., a gene associated with a disease or disorder).

[0695] Some aspects of this disclosure provide methods of using the fusion proteins, or complexes provided herein. For example, some aspects of this disclosure provide methods comprising contacting a DNA molecule with any of the fusion proteins provided herein, and with at least one guide RNA, wherein the guide RNA is about 15-100 nucleotides long and comprises a sequence of at least 10 contiguous nucleotides that is complementary to a target sequence. In some embodiments, the 3′ end of the target sequence is immediately adjacent to an AGC, GAG, TTT, GTG, or CAA sequence. In some embodiments, the 3′ end of the target sequence is immediately adjacent to an NGA, NGCG, NGN, NNGRRT, NNNRRT, NGCG, NGCN, NGTN, NGTN, NGTN, or 5′ (TTTV) sequence. In some embodiments, the 3′ end of the target sequence is immediately adjacent to an e.g., TTN, DTTN, GTTN, ATTN, ATTC, DTTNT, WTTN, HATY, TTTN, TTTV, TTTC, TG, RTR, or YTN PAM site.

[0696] It will be understood that the numbering of the specific positions or residues in the respective sequences depends on the particular protein and numbering scheme used. Numbering might differ, e.g., in precursors of a mature protein and the mature protein itself, and differences in sequences from species to species may affect numbering. One of skill in the art will be able to identify the respective residue in any homologous protein and in the respective encoding nucleic acid by methods well known in the art, e.g., by sequence alignment and determination of homologous residues.

[0697] It will be apparent to those of skill in the art that in order to target any of the fusion proteins disclosed herein, to a target site, e.g., a site comprising a mutation to be edited, it is typically necessary to co-express the fusion protein together with a guide RNA. As explained in more detail elsewhere herein, a guide RNA typically comprises a tracrRNA framework allowing for napDNAbp (e.g., Cas9 or Cas12) binding, and a guide sequence, which confers sequence specificity to the napDNAbp:nucleic acid editing enzyme/domain fusion protein. Alternatively, the guide RNA and tracrRNA may be provided separately, as two nucleic acid molecules. In some embodiments, the guide RNA comprises a structure, wherein the guide sequence comprises a sequence that is complementary to the target sequence. The guide sequence is typically 20 nucleotides long. The sequences of suitable guide RNAs for targeting napDNAbp:nucleic acid editing enzyme/domain fusion proteins to specific genomic target sites will be apparent to those of skill in the art based on the instant disclosure. Such suitable guide RNA sequences typically comprise guide sequences that are complementary to a nucleic sequence within 50 nucleotides upstream or downstream of the target nucleotide to be edited. Some exemplary guide RNA sequences suitable for targeting any of the provided fusion proteins to specific target sequences are provided herein.

[0698] Distinct portions of sgRNA are predicted to form various features that interact with Cas9 (e.g., SpyCas9) and/or the DNA target. Six conserved modules have been identified within native crRNA:tracrRNA duplexes and single guide RNAs (sgRNAs) that direct Cas9 endonuclease activity (see Briner et al., Guide RNA Functional Modules Direct Cas9 Activity and Orthogonality Mol Cell. 2014 Oct. 23; 56(2):333-339). The six modules include the spacer responsible for DNA targeting, the upper stem, bulge, lower stem formed by the CRISPR repeat:tracrRNA duplex, the nexus, and hairpins from the 3′ end of the tracrRNA. The upper and lower stems interact with Cas9 mainly through sequence-independent interactions with the phosphate backbone. In some embodiments, the upper stem is dispensable. In some embodiments, the conserved uracil nucleotide sequence at the base of the lower stem is dispensable. The bulge participates in specific side-chain interactions with the Rec domain of Cas9. The nucleobase of U44 interacts with the side chains of Tyr 325 and His 328, while G43 interacts with Tyr 329. The nexus forms the core of the sgRNA:Cas9 interactions and lies at the intersection between the sgRNA and both Cas9 and the target DNA. The nucleobases of A51 and A52 interact with the side chain of Phe 1105; U56 interacts with Arg 457 and Asn 459; the nucleobase of U59 inserts into a hydrophobic pocket defined by side chains of Arg 74, Asn 77, Pro 475, Leu 455, Phe 446, and Ile 448; C60 interacts with Leu 455, Ala 456, and Asn 459, and C61 interacts with the side chain of Arg 70, which in turn interacts with C15. In some embodiments, one or more of these mutations are made in the bulge and/or the nexus of a sgRNA for a Cas9 (e.g., spyCas9) to optimize sgRNA:Cas9 interactions.

[0699] Moreover, the tracrRNA nexus and hairpins are critical for Cas9 pairing and can be swapped to cross orthogonality barriers separating disparate Cas9 proteins, which is instrumental for further harnessing of orthogonal Cas9 proteins. In some embodiments, the nexus and hairpins are swapped to target orthogonal Cas9 proteins. In some embodiments, a sgRNA is dispensed of the upper stem, hairpin 1, and/or the sequence flexibility of the lower stem to design a guide RNA that is more compact and conformationally stable. In some embodiments, the modules are modified to optimize multiplex editing using a single Cas9 with various chimeric guides or by concurrently using orthogonal systems with different combinations of chimeric sgRNAs. Details regarding guide functional modules and methods thereof are described, for example, in Briner et al., Guide RNA Functional Modules Direct Cas9 Activity and Orthogonality Mol Cell. 2014 Oct. 23; 56(2):333-339, the contents of which is incorporated by reference herein in its entirety.

[0700] The domains of the base editor disclosed herein can be arranged in any order. Non-limiting examples of a base editor comprising a fusion protein comprising e.g., a polynucleotide-programmable nucleotide-binding domain (e.g., Cas9 or Cas12) and a deaminase domain (e.g., cytidine or adenosine deaminase) can be arranged as follows:
[0701] NH2-[nucleobase editing domain]-Linker1-[nucleobase editing domain]-COOH;
[0702] NH2-[deaminase]-Linker1-[nucleobase editing domain]-COOH;
[0703] NH2-[deaminase]-Linker1-[nucleobase editing domain]-Linker2-[UGI]-COOH;
[0704] NH2-[deaminase]-Linker1-[nucleobase editing domain]-COOH;
[0705] NH2-[adenosine deaminase]-Linker1-[nucleobase editing domain]-COOH;
[0706] NH2-[nucleobase editing domain]-[deaminase]-COOH;
[0707] NH2-[deaminase]-[nucleobase editing domain]-[inosine BER inhibitor]-COOH;
[0708] NH2-[deaminase]-[inosine BER inhibitor]-[nucleobase editing domain]-COOH;
[0709] NH2-[inosine BER inhibitor]-[deaminase]-[nucleobase editing domain]-COOH;
[0710] NH2-[nucleobase editing domain]-[deaminase]-[inosine BER inhibitor]-COOH;
[0711] NH2-[nucleobase editing domain]-[inosine BER inhibitor]-[deaminase]-COOH;
[0712] NH2-[inosine BER inhibitor]-[nucleobase editing domain]-[deaminase]-COOH;
[0713] NH2-[nucleobase editing domain]-Linker1-[deaminase]-Linker2-[nucleobase editing domain]-COOH;
[0714] NH2-[nucleobase editing domain]-Linker1-[deaminase]-[nucleobase editing domain]-COOH;
[0715] NH2-[nucleobase editing domain]-[deaminase]-Linker2-[nucleobase editing domain]-COOH;
[0716] NH2-[nucleobase editing domain]-[deaminase]-[nucleobase editing domain]-COOH;
[0717] NH2-[nucleobase editing domain]-Linker1-[deaminase]-Linker2-[nucleobase editing domain]-[inosine BER inhibitor]-COOH;
[0718] NH2-[nucleobase editing domain]-Linker1-[deaminase]-[nucleobase editing domain]-[inosine BER inhibitor]-COOH;
[0719] NH2-[nucleobase editing domain]-[deaminase]-Linker2-[nucleobase editing domain]-[inosine BER inhibitor]-COOH;
[0720] NH2-[nucleobase editing domain]-[deaminase]-[nucleobase editing domain]-[inosine BER inhibitor]-COOH;
[0721] NH2-[inosine BER inhibitor]-[nucleobase editing domain]-Linker1-[deaminase]-Linker2-[nucleobase editing domain]-COOH;
[0722] NH2-[inosine BER inhibitor]-[nucleobase editing domain]-Linker1-[deaminase]-[nucleobase editing domain]-COOH;
[0723] NH2-[inosine BER inhibitor]-[nucleobase editing domain]-[deaminase]-Linker2-[nucleobase editing domain]-COOH; or
[0724] NH2-[inosine BER inhibitor]NH2-[nucleobase editing domain]-[deaminase]-[nucleobase editing domain]-C00H.

[0725] In some embodiments, the base editing fusion proteins provided herein need to be positioned at a precise location, for example, where a target base is placed within a defined region (e.g., a “deamination window”). In some embodiments, a target can be within a 4-base region. In some embodiments, such a defined target region can be approximately 15 bases upstream of the PAM. See Komor, A. C., et al., “Programmable editing of a target base in genomic DNA without double-stranded DNA cleavage” Nature 533, 420-424 (2016); Gaudelli, N. M., et al., “Programmable base editing of A•T to G•C in genomic DNA without DNA cleavage” Nature 551, 464-471 (2017); and Komor, A. C., et al., “Improved base excision repair inhibition and bacteriophage Mu Gam protein yields C:G-to-T:A base editors with higher efficiency and product purity” Science Advances 3:eaao4774 (2017), the entire contents of which are hereby incorporated by reference.

[0726] A defined target region can be a deamination window. A deamination window can be the defined region in which a base editor acts upon and deaminates a target nucleotide. In some embodiments, the deamination window is within a 2, 3, 4, 5, 6, 7, 8, 9, or 10 base regions. In some embodiments, the deamination window is 5, 6, 7, 8, 9, 10, 11, 12, 13, 14, 15, 16, 17, 18, 19, 20, 21, 22, 23, 24, or 25 bases upstream of the PAM.

[0727] The base editors of the present disclosure can comprise any domain, feature or amino acid sequence which facilitates the editing of a target polynucleotide sequence. For example, in some embodiments, the base editor comprises a nuclear localization sequence (NLS). In some embodiments, an NLS of the base editor is localized between a deaminase domain and a napDNAbp domain. In some embodiments, an NLS of the base editor is localized C-terminal to a napDNAbp domain.

[0728] Non-limiting examples of protein domains which can be included in the fusion protein include a deaminase domain (e.g., adenosine deaminase or cytidine deaminase), a uracil glycosylase inhibitor (UGI) domain, epitope tags, reporter gene sequences, and/or protein domains having one or more of the activities described herein.

[0729] A domain may be detected or labeled with an epitope tag, a reporter protein, other binding domains. Non-limiting examples of epitope tags include histidine (His) tags, V5 tags, FLAG tags, influenza hemagglutinin (HA) tags, Myc tags, VSV-G tags, and thioredoxin (Trx) tags. Examples of reporter genes include, but are not limited to, glutathione-5-transferase (GST), horseradish peroxidase (HRP), chloramphenicol acetyltransferase (CAT) beta-galactosidase, beta-glucuronidase, luciferase, green fluorescent protein (GFP), HcRed, DsRed, cyan fluorescent protein (CFP), yellow fluorescent protein (YFP), and autofluorescent proteins including blue fluorescent protein (BFP). Additional protein sequences can include amino acid sequences that bind DNA molecules or bind other cellular molecules, including but not limited to maltose binding protein (MBP), S-tag, Lex A DNA binding domain (DBD) fusions, GAL4 DNA binding domain fusions, and herpes simplex virus (HSV) BP16 protein fusions.

### Methods of Using Fusion Proteins Comprising a Cytidine or Adenosine Deaminase and a Cas9 Domain

[0730] Some aspects of this disclosure provide methods of using the fusion proteins, or complexes provided herein. For example, some aspects of this disclosure provide methods comprising contacting a DNA molecule with any of the fusion proteins provided herein, and with at least one guide RNA described herein.

[0731] In some embodiments, a fusion protein of the invention is used for editing a target gene of interest. In particular, a cytidine deaminase or adenosine deaminase nucleobase editor described herein is capable of making multiple mutations within a target sequence. These mutations may affect the function of the target. For example, when a cytidine deaminase or adenosine deaminase nucleobase editor is used to target a regulatory region the function of the regulatory region is altered and the expression of the downstream protein is reduced or eliminated.

[0732] It will be understood that the numbering of the specific positions or residues in the respective sequences depends on the particular protein and numbering scheme used. Numbering might be different, e.g., in precursors of a mature protein and the mature protein itself, and differences in sequences from species to species may affect numbering. One of skill in the art will be able to identify the respective residue in any homologous protein and in the respective encoding nucleic acid by methods well known in the art, e.g., by sequence alignment and determination of homologous residues.

[0733] It will be apparent to those of skill in the art that in order to target any of the fusion proteins comprising a Cas9 domain and a cytidine or adenosine deaminase, as disclosed herein, to a target site, e.g., a site comprising a mutation to be edited, it is typically necessary to co-express the fusion protein together with a guide RNA, e.g., an sgRNA. As explained in more detail elsewhere herein, a guide RNA typically comprises a tracrRNA framework allowing for Cas9 binding, and a guide sequence, which confers sequence specificity to the Cas9:nucleic acid editing enzyme/domain fusion protein. Alternatively, the guide RNA and tracrRNA may be provided separately, as two nucleic acid molecules. In some embodiments, the guide RNA comprises a structure, wherein the guide sequence comprises a sequence that is complementary to the target sequence. The guide sequence is typically 20 nucleotides long. The sequences of suitable guide RNAs for targeting Cas9:nucleic acid editing enzyme/domain fusion proteins to specific genomic target sites will be apparent to those of skill in the art based on the instant disclosure. Such suitable guide RNA sequences typically comprise guide sequences that are complementary to a nucleic sequence within 50 nucleotides upstream or downstream of the target nucleotide to be edited. Some exemplary guide RNA sequences suitable for targeting any of the provided fusion proteins to specific target sequences are provided herein.

### Base Editor Efficiency

[0734] In some embodiments, the purpose of the methods provided herein is to alter a gene and/or gene product via gene editing. The nucleobase editing proteins provided herein can be used for gene editing-based human therapeutics in vitro or in vivo. It will be understood by the skilled artisan that the nucleobase editing proteins provided herein, e.g., the fusion proteins comprising a polynucleotide programmable nucleotide binding domain (e.g., Cas9) and a nucleobase editing domain (e.g., an adenosine deaminase domain or a cytidine deaminase domain) can be used to edit a nucleotide from A to G or C to T.

[0735] Advantageously, base editing systems as provided herein provide genome editing without generating double-strand DNA breaks, without requiring a donor DNA template, and without inducing an excess of stochastic insertions and deletions as CRISPR may do. In some embodiments, the present disclosure provides base editors that efficiently generate an intended mutation, such as a STOP codon, in a nucleic acid (e.g., a nucleic acid within a genome of a subject) without generating a significant number of unintended mutations, such as unintended point mutations. In some embodiments, an intended mutation is a mutation that is generated by a specific base editor (e.g., adenosine base editor or cytidine base editor) bound to a guide polynucleotide (e.g., gRNA), specifically designed to generate the intended mutation. In some embodiments, the intended mutation is in a gene associated with a target antigen associated with a disease or disorder, e.g., hereditary angioedema. In some embodiments, the intended mutation is an adenine (A) to guanine (G) point mutation (e.g., SNP) in a gene associated with a target antigen associated with a disease or disorder, e.g. hereditary angioedema. In some embodiments, the intended mutation is an adenine (A) to guanine (G) point mutation within the coding region or non-coding region of a gene (e.g., regulatory region or element). In some embodiments, the intended mutation is a cytosine (C) to thymine (T) point mutation (e.g., SNP) in a gene associated with a target antigen associated with a disease or disorder, e.g., KLKB1. In some embodiments, the intended mutation is a cytosine (C) to thymine (T) point mutation within the coding region or non-coding region of a gene (e.g., regulatory region or element). In some embodiments, the intended mutation is a point mutation that generates a STOP codon, for example, a premature STOP codon within the coding region of a gene. In some embodiments, the intended mutation is a mutation that eliminates a stop codon.

[0736] The base editors of the invention advantageously modify a specific nucleotide base encoding a protein without generating a significant proportion of indels. An “indel”, as used herein, refers to the insertion or deletion of a nucleotide base within a nucleic acid. Such insertions or deletions can lead to frame shift mutations within a coding region of a gene. In some embodiments, it is desirable to generate base editors that efficiently modify (e.g. mutate) a specific nucleotide within a nucleic acid, without generating a large number of insertions or deletions (i.e., indels) in the nucleic acid. In some embodiments, it is desirable to generate base editors that efficiently modify (e.g. mutate or methylate) a specific nucleotide within a nucleic acid, without generating a large number of insertions or deletions (i.e., indels) in the nucleic acid. In certain embodiments, any of the base editors provided herein can generate a greater proportion of intended modifications (e.g., methylations) versus indels. In certain embodiments, any of the base editors provided herein can generate a greater proportion of intended modifications (e.g., mutations) versus indels.

[0737] In some embodiments, the base editors provided herein are capable of generating a ratio of intended mutations to indels (i.e., intended point mutations:unintended point mutations) that is greater than 1:1. In some embodiments, the base editors provided herein are capable of generating a ratio of intended mutations to indels that is at least 1.5:1, at least 2:1, at least 2.5:1, at least 3:1, at least 3.5:1, at least 4:1, at least 4.5:1, at least 5:1, at least 5.5:1, at least 6:1, at least 6.5:1, at least 7:1, at least 7.5:1, at least 8:1, at least 10:1, at least 12:1, at least 15:1, at least 20:1, at least 25:1, at least 30:1, at least 40:1, at least 50:1, at least 100:1, at least 200:1, at least 300:1, at least 400:1, at least 500:1, at least 600:1, at least 700:1, at least 800:1, at least 900:1, or at least 1000:1, or more. The number of intended mutations and indels may be determined using any suitable method.

[0738] In some embodiments, the base editors provided herein can limit formation of indels in a region of a nucleic acid. In some embodiments, the region is at a nucleotide targeted by a base editor or a region within 2, 3, 4, 5, 6, 7, 8, 9, or 10 nucleotides of a nucleotide targeted by a base editor. In some embodiments, any of the base editors provided herein can limit the formation of indels at a region of a nucleic acid to less than 1%, less than 1.5%, less than 2%, less than 2.5%, less than 3%, less than 3.5%, less than 4%, less than 4.5%, less than 5%, less than 6%, less than 7%, less than 8%, less than 9%, less than 10%, less than 12%, less than 15%, or less than 20%. The number of indels formed at a nucleic acid region may depend on the amount of time a nucleic acid (e.g., a nucleic acid within the genome of a cell) is exposed to a base editor. In some embodiments, a number or proportion of indels is determined after at least 1 hour, at least 2 hours, at least 6 hours, at least 12 hours, at least 24 hours, at least 36 hours, at least 48 hours, at least 3 days, at least 4 days, at least 5 days, at least 7 days, at least 10 days, or at least 14 days of exposing a nucleic acid (e.g., a nucleic acid within the genome of a cell) to a base editor.

[0739] Some aspects of the disclosure are based on the recognition that any of the base editors provided herein are capable of efficiently generating an intended mutation in a nucleic acid (e.g. a nucleic acid within a genome of a subject) without generating a considerable number of unintended mutations (e.g., spurious off-target editing or bystander editing). In some embodiments, an intended mutation is a mutation that is generated by a specific base editor bound to a gRNA, specifically designed to generate the intended mutation. In some embodiments, the intended mutation is a mutation that generates a stop codon, for example, a premature stop codon within the coding region of a gene. In some embodiments, the intended mutation is a mutation that eliminates a stop codon. In some embodiments, the intended mutation is a mutation that alters the splicing of a gene. In some embodiments, the intended mutation is a mutation that alters the regulatory sequence of a gene (e.g., a gene promotor or gene repressor). In some embodiments, any of the base editors provided herein are capable of generating a ratio of intended mutations to unintended mutations (e.g., intended mutations:unintended mutations) that is greater than 1:1. In some embodiments, any of the base editors provided herein are capable of generating a ratio of intended mutations to unintended mutations that is at least 1.5:1, at least 2:1, at least 2.5:1, at least 3:1, at least 3.5:1, at least 4:1, at least 4.5:1, at least 5:1, at least 5.5:1, at least 6:1, at least 6.5:1, at least 7:1, at least 7.5:1, at least 8:1, at least 10:1, at least 12:1, at least 15:1, at least 20:1, at least 25:1, at least 30:1, at least 40:1, at least 50:1, at least 100:1, at least 150:1, at least 200:1, at least 250:1, at least 500:1, or at least 1000:1, or more. It should be appreciated that the characteristics of the base editors described herein may be applied to any of the fusion proteins, or methods of using the fusion proteins provided herein.

[0740] Base editing is often referred to as a “modification”, such as, a genetic modification, a gene modification and modification of the nucleic acid sequence and is clearly understandable based on the context that the modification is a base editing modification. A base editing modification is therefore a modification at the nucleotide base level, for example as a result of the deaminase activity discussed throughout the disclosure, which then results in a change in the gene sequence, and may affect the gene product. In essence therefore, the gene editing modification described herein may result in a modification of the gene, structurally and/or functionally, wherein the expression of the gene product may be modified, for example, the expression of the gene is knocked out; or conversely, enhanced, or, in some circumstances, the gene function or activity may be modified. Using the methods disclosed herein, a base editing efficiency may be determined as the knockdown efficiency of the gene in which the base editing is performed, wherein the base editing is intended to knockdown the expression of the gene. A knockdown level may be validated quantitatively by determining the expression level by any detection assay, such as assay for protein expression level, for example, by flow cytometry; assay for detecting RNA expression such as quantitative RT-PCR, northern blot analysis, or any other suitable assay such as pyrosequencing; and may be validated qualitatively by nucleotide sequencing reactions.

[0741] In some embodiments, the modification, e.g., single base edit results in at least 10% reduction of the gene targeted expression. In some embodiments, the base editing efficiency may result in at least 10% reduction of the gene targeted expression. In some embodiments, the base editing efficiency may result in at least 20% reduction of the gene targeted expression. In some embodiments, the base editing efficiency may result in at least 30% reduction of the gene targeted expression. In some embodiments, the base editing efficiency may result in at least 40% reduction of the gene targeted expression. In some embodiments, the base editing efficiency may result in at least 50% reduction of the gene targeted expression. In some embodiments, the base editing efficiency may result in at least 60% reduction of the targeted gene expression. In some embodiments, the base editing efficiency may result in at least 70% reduction of the targeted gene expression. In some embodiments, the base editing efficiency may result in at least 80% reduction of the targeted gene expression. In some embodiments, the base editing efficiency may result in at least 90% reduction of the targeted gene expression. In some embodiments, the base editing efficiency may result in at least 91% reduction of the targeted gene expression. In some embodiments, the base editing efficiency may result in at least 92% reduction of the targeted gene expression. In some embodiments, the base editing efficiency may result in at least 93% reduction of the targeted gene expression. In some embodiments, the base editing efficiency may result in at least 94% reduction of the targeted gene expression. In some embodiments, the base editing efficiency may result in at least 95% reduction of the targeted gene expression. In some embodiments, the base editing efficiency may result in at least 96% reduction of the targeted gene expression. In some embodiments, the base editing efficiency may result in at least 97% reduction of the targeted gene expression. In some embodiments, the base editing efficiency may result in at least 98% reduction of the targeted gene expression. In some embodiments, the base editing efficiency may result in at least 99% reduction of the targeted gene expression. In some embodiments, the base editing efficiency may result in knockout (100% knockdown of the gene expression) of the gene that is targeted.

[0742] In some embodiments, any of the base editor systems provided herein result in less than 50%, less than 40%, less than 30%, less than 20%, less than 19%, less than 18%, less than 17%, less than 16%, less than 15%, less than 14%, less than 13%, less than 12%, less than 11%, less than 10%, less than 9%, less than 8%, less than 7%, less than 6%, less than 5%, less than 4%, less than 3%, less than 2%, less than 1%, less than 0.9%, less than 0.8%, less than 0.7%, less than 0.6%, less than 0.5%, less than 0.4%, less than 0.3%, less than 0.2%, less than 0.1%, less than 0.09%, less than 0.08%, less than 0.07%, less than 0.06%, less than 0.05%, less than 0.04%, less than 0.03%, less than 0.02%, or less than 0.01% indel formation in the target polynucleotide sequence.

[0743] In some embodiments, targeted modifications, e.g., single base editing, are used simultaneously to target at least 4, 5, 6, 7, 8, 9, 10, 11, 12 13, 14, 15, 16, 17, 18, 19, 20, 21, 22, 23, 24, 25, 26, 27, 28, 29, 30, 31, 32, 33, 34, 35, 36, 37, 38, 39, 40, 41, 42, 43, 44, 45, 46, 47, 48, 49 or 50 different endogenous sequences for base editing with different guide RNAs. In some embodiments, targeted modifications, e.g. single base editing, are used to sequentially target at least 4, 5, 6, 7, 8, 9, 10, 11, 12 13, 14, 15, 16, 17, 18, 19, 20, 21, 22, 23, 24, 25, 26, 27, 28, 29, 30, 31, 32, 33, 34, 35, 36, 37, 38, 39, 40, 41, 42, 43, 44, 45, 46, 47, 48, 49 50, or more different endogenous gene sequences for base editing with different guide RNAs.

[0744] Some aspects of the disclosure are based on the recognition that any of the base editors provided herein are capable of efficiently generating an intended mutation, such as a point mutation, in a nucleic acid (e.g., a nucleic acid within a genome of a subject) without generating a significant number of unintended mutations, such as unintended point mutations (i.e., mutation of bystanders). In some embodiments, any of the base editors provided herein are capable of generating at least 0.01% of intended mutations (i.e., at least 0.01% base editing efficiency). In some embodiments, any of the base editors provided herein are capable of generating at least 0.01%, 1%, 2%, 3%, 4%, 5%, 10%, 15%, 20%, 25%, 30%, 40%, 45%, 50%, 60%, 70%, 80%, 90%, 95%, or 99% of intended mutations.

[0745] In some embodiments, any of the base editor systems comprising one of the ABE8 base editor variants described herein result in less than 50%, less than 40%, less than 30%, less than 20%, less than 19%, less than 18%, less than 17%, less than 16%, less than 15%, less than 14%, less than 13%, less than 12%, less than 11%, less than 10%, less than 9%, less than 8%, less than 7%, less than 6%, less than 5%, less than 4%, less than 3%, less than 2%, less than 1%, less than 0.9%, less than 0.8%, less than 0.7%, less than 0.6%, less than 0.5%, less than 0.4%, less than 0.3%, less than 0.2%, less than 0.1%, less than 0.09%, less than 0.08%, less than 0.07%, less than 0.06%, less than 0.05%, less than 0.04%, less than 0.03%, less than 0.02%, or less than 0.01% indel formation in the target polynucleotide sequence. In some embodiments, any of the base editor systems comprising one of the ABE8 base editor variants described herein result in less than 0.8% indel formation in the target polynucleotide sequence. In some embodiments, any of the base editor systems comprising one of the ABE8 base editor variants described herein result in at most 0.8% indel formation in the target polynucleotide sequence. In some embodiments, any of the base editor systems comprising one of the ABE8 base editor variants described herein result in less than 0.3% indel formation in the target polynucleotide sequence. In some embodiments, any of the base editor systems comprising one of the ABE8 base editor variants described results in lower indel formation in the target polynucleotide sequence compared to a base editor system comprising one of ABE7 base editors. In some embodiments, any of the base editor systems comprising one of the ABE8 base editor variants described herein results in lower indel formation in the target polynucleotide sequence compared to a base editor system comprising an ABE7.10.

[0746] In some embodiments, any of the base editor systems comprising one of the ABE8 base editor variants described herein has reduction in indel frequency compared to a base editor system comprising one of the ABE7 base editors. In some embodiments, any of the base editor systems comprising one of the ABE8 base editor variants described herein has at least 0.01%, at least 1%, at least 2%, at least 3%, at least 4%, at least 5%, at least 10%, at least 15%, at least 20%, at least 25%, at least 30%, at least 35%, at least 40%, at least 45%, at least 50%, at least 55%, at least 60%, at least 65%, at least 70%, at least 75%, at least 80%, at least 85%, at least 90%, or at least 95% reduction in indel frequency compared to a base editor system comprising one of the ABE7 base editors. In some embodiments, a base editor system comprising one of the ABE8 base editor variants described herein has at least 0.01%, at least 1%, at least 2%, at least 3%, at least 4%, at least 5%, at least 10%, at least 15%, at least 20%, at least 25%, at least 30%, at least 35%, at least 40%, at least 45%, at least 50%, at least 55%, at least 60%, at least 65%, at least 70%, at least 75%, at least 80%, at least 85%, at least 90%, or at least 95% reduction in indel frequency compared to a base editor system comprising an ABE7.10.

[0747] The invention provides adenosine deaminase variants (e.g., ABE8 variants) that have increased efficiency and specificity. In particular, the adenosine deaminase variants described herein are more likely to edit a desired base within a polynucleotide, and are less likely to edit bases that are not intended to be altered (e.g., “bystanders”).

[0748] In some embodiments, any of the base editing system comprising one of the ABE8 base editor variants described herein has reduced bystander editing or mutations. In some embodiments, an unintended editing or mutation is a bystander mutation or bystander editing, for example, base editing of a target base (e.g., A or C) in an unintended or non-target position in a target window of a target nucleotide sequence. In some embodiments, any of the base editing system comprising one of the ABE8 base editor variants described herein has reduced bystander editing or mutations compared to a base editor system comprising an ABE7 base editor, e.g., ABE7.10. In some embodiments, any of the base editing system comprising one of the ABE8 base editor variants described herein has reduced bystander editing or mutations by at least 1%, at least 2%, at least 3%, at least 4%, at least 5%, at least 10%, at least 15%, at least 20%, at least 25%, at least 30%, at least 35%, at least 40%, at least 45%, at least 50%, at least 55%, at least 60%, at least 65%, at least 70%, at least 75%, at least 80%, at least 85%, at least 90%, at least 95%, or at least 99% compared to a base editor system comprising an ABE7 base editor, e.g., ABE7.10. In some embodiments, any of the base editing system comprising one of the ABE8 base editor variants described herein has reduced bystander editing or mutations by at least 1.1 fold, at least 1.2 fold, at least 1.3 fold, at least 1.4 fold, at least 1.5 fold, at least 1.6 fold, at least 1.7 fold, at least 1.8 fold, at least 1.9 fold, at least 2.0 fold, at least 2.1 fold, at least 2.2 fold, at least 2.3 fold, at least 2.4 fold, at least 2.5 fold, at least 2.6 fold, at least 2.7 fold, at least 2.8 fold, at least 2.9 fold, or at least 3.0 fold compared to a base editor system comprising an ABE7 base editor, e.g., ABE7.10.

[0749] In some embodiments, any of the base editing system comprising one of the ABE8 base editor variants described herein has reduced spurious editing. In some embodiments, an unintended editing or mutation is a spurious mutation or spurious editing, for example, non-specific editing or guide independent editing of a target base (e.g., A or C) in an unintended or non-target region of the genome. In some embodiments, any of the base editing system comprising one of the ABE8 base editor variants described herein has reduced spurious editing compared to a base editor system comprising an ABE7 base editor, e.g., ABE7.10. In some embodiments, any of the base editing system comprising one of the ABE8 base editor variants described herein has reduced spurious editing by at least 1%, at least 2%, at least 3%, at least 4%, at least 5%, at least 10%, at least 15%, at least 20%, at least 25%, at least 30%, at least 35%, at least 40%, at least 45%, at least 50%, at least 55%, at least 60%, at least 65%, at least 70%, at least 75%, at least 80%, at least 85%, at least 90%, at least 95%, or at least 99% compared to a base editor system comprising an ABE7 base editor, e.g., ABE7.10. In some embodiments, any of the base editing system comprising one of the ABE8 base editor variants described herein has reduced spurious editing by at least 1.1 fold, at least 1.2 fold, at least 1.3 fold, at least 1.4 fold, at least 1.5 fold, at least 1.6 fold, at least 1.7 fold, at least 1.8 fold, at least 1.9 fold, at least 2.0 fold, at least 2.1 fold, at least 2.2 fold, at least 2.3 fold, at least 2.4 fold, at least 2.5 fold, at least 2.6 fold, at least 2.7 fold, at least 2.8 fold, at least 2.9 fold, or at least 3.0 fold compared to a base editor system comprising an ABE7 base editor, e.g., ABE7.10.

[0750] In some embodiments, any of the ABE8 base editor variants described herein have at least 0.01%, at least 1%, at least 2%, at least 3%, at least 4%, at least 5%, at least 10%, at least 15%, at least 20%, at least 25%, at least 30%, at least 35%, at least 40%, at least 45%, at least 50%, at least 55%, at least 60%, at least 65%, at least 70%, at least 75%, at least 80%, at least 85%, at least 90%, at least 95%, or at least 99% base editing efficiency. In some embodiments, the base editing efficiency may be measured by calculating the percentage of edited nucleobases in a population of cells. In some embodiments, any of the ABE8 base editor variants described herein have base editing efficiency of at least 0.01%, at least 1%, at least 2%, at least 3%, at least 4%, at least 5%, at least 10%, at least 15%, at least 20%, at least 25%, at least 30%, at least 35%, at least 40%, at least 45%, at least 50%, at least 55%, at least 60%, at least 65%, at least 70%, at least 75%, at least 80%, at least 85%, at least 90%, at least 95%, or at least 99% as measured by edited nucleobases in a population of cells.

[0751] In some embodiments, any of the ABE8 base editor variants described herein has higher base editing efficiency compared to the ABE7 base editors. In some embodiments, any of the ABE8 base editor variants described herein have at least 1%, at least 2%, at least 3%, at least 4%, at least 5%, at least 10%, at least 15%, at least 20%, at least 25%, at least 30%, at least 35%, at least 40%, at least 45%, at least 50%, at least 55%, at least 60%, at least 65%, at least 70%, at least 75%, at least 80%, at least 85%, at least 90%, at least 95%, at least 99%, at least 100%, at least 105%, at least 110%, at least 115%, at least 120%, at least 125%, at least 130%, at least 135%, at least 140%, at least 145%, at least 150%, at least 155%, at least 160%, at least 165%, at least 170%, at least 175%, at least 180%, at least 185%, at least 190%, at least 195%, at least 200%, at least 210%, at least 220%, at least 230%, at least 240%, at least 250%, at least 260%, at least 270%, at least 280%, at least 290%, at least 300%, at least 310%, at least 320%, at least 330%, at least 340%, at least 350%, at least 360%, at least 370%, at least 380%, at least 390%, at least 400%, at least 450%, or at least 500% higher base editing efficiency compared to an ABE7 base editor, e.g., ABE7.10.

[0752] In some embodiments, any of the ABE8 base editor variants described herein has at least 1.1 fold, at least 1.2 fold, at least 1.3 fold, at least 1.4 fold, at least 1.5 fold, at least 1.6 fold, at least 1.7 fold, at least 1.8 fold, at least 1.9 fold, at least 2.0 fold, at least 2.1 fold, at least 2.2 fold, at least 2.3 fold, at least 2.4 fold, at least 2.5 fold, at least 2.6 fold, at least 2.7 fold, at least 2.8 fold, at least 2.9 fold, at least 3.0 fold, at least 3.1 fold, at least 3.2, at least 3.3 fold, at least 3.4 fold, at least 3.5 fold, at least 3.6 fold, at least 3.7 fold, at least 3.8 fold, at least 3.9 fold, at least 4.0 fold, at least 4.1 fold, at least 4.2 fold, at least 4.3 fold, at least 4.4 fold, at least 4.5 fold, at least 4.6 fold, at least 4.7 fold, at least 4.8 fold, at least 4.9 fold, or at least 5.0 fold higher base editing efficiency compared to an ABE7 base editor, e.g., ABE7.10.

[0753] In some embodiments, any of the ABE8 base editor variants described herein have at least 0.01%, at least 1%, at least 2%, at least 3%, at least 4%, at least 5%, at least 10%, at least 15%, at least 20%, at least 25%, at least 30%, at least 35%, at least 40%, at least 45%, at least 50%, at least 55%, at least 60%, at least 65%, at least 70%, at least 75%, at least 80%, at least 85%, at least 90%, at least 95%, or at least 99% on-target base editing efficiency. In some embodiments, any of the ABE8 base editor variants described herein have on-target base editing efficiency of at least 0.01%, at least 1%, at least 2%, at least 3%, at least 4%, at least 5%, at least 10%, at least 15%, at least 20%, at least 25%, at least 30%, at least 35%, at least 40%, at least 45%, at least 50%, at least 55%, at least 60%, at least 65%, at least 70%, at least 75%, at least 80%, at least 85%, at least 90%, at least 95%, or at least 99% as measured by edited target nucleobases in a population of cells.

[0754] In some embodiments, any of the ABE8 base editor variants described herein has higher on-target base editing efficiency compared to the ABE7 base editors. In some embodiments, any of the ABE8 base editor variants described herein have at least 1%, at least 2%, at least 3%, at least 4%, at least 5%, at least 10%, at least 15%, at least 20%, at least 25%, at least 30%, at least 35%, at least 40%, at least 45%, at least 50%, at least 55%, at least 60%, at least 65%, at least 70%, at least 75%, at least 80%, at least 85%, at least 90%, at least 95%, at least 99%, at least 100%, at least 105%, at least 110%, at least 115%, at least 120%, at least 125%, at least 130%, at least 135%, at least 140%, at least 145%, at least 150%, at least 155%, at least 160%, at least 165%, at least 170%, at least 175%, at least 180%, at least 185%, at least 190%, at least 195%, at least 200%, at least 210%, at least 220%, at least 230%, at least 240%, at least 250%, at least 260%, at least 270%, at least 280%, at least 290%, at least 300%, at least 310%, at least 320%, at least 330%, at least 340%, at least 350%, at least 360%, at least 370%, at least 380%, at least 390%, at least 400%, at least 450%, or at least 500% higher on-target base editing efficiency compared to an ABE7 base editor, e.g., ABE7.10.

[0755] In some embodiments, any of the ABE8 base editor variants described herein has at least 1.1 fold, at least 1.2 fold, at least 1.3 fold, at least 1.4 fold, at least 1.5 fold, at least 1.6 fold, at least 1.7 fold, at least 1.8 fold, at least 1.9 fold, at least 2.0 fold, at least 2.1 fold, at least 2.2 fold, at least 2.3 fold, at least 2.4 fold, at least 2.5 fold, at least 2.6 fold, at least 2.7 fold, at least 2.8 fold, at least 2.9 fold, at least 3.0 fold, at least 3.1 fold, at least 3.2 fold, at least 3.3 fold, at least 3.4 fold, at least 3.5 fold, at least 3.6 fold, at least 3.7 fold, at least 3.8 fold, at least 3.9 fold, at least 4.0 fold, at least 4.1 fold, at least 4.2 fold, at least 4.3 fold, at least 4.4 fold, at least 4.5 fold, at least 4.6 fold, at least 4.7 fold, at least 4.8 fold, at least 4.9 fold, or at least 5.0 fold higher on-target base editing efficiency compared to an ABE7 base editor, e.g., ABE7.10.

[0756] The ABE8 base editor variants described herein may be delivered to a host cell via a plasmid, a vector, a LNP complex, or an mRNA. In some embodiments, any of the ABE8 base editor variants described herein is delivered to a host cell as an mRNA. In some embodiments, an ABE8 base editor delivered via a nucleic acid based delivery system, e.g., an mRNA, has on-target editing efficiency of at least at least 1%, at least 2%, at least 3%, at least 4%, at least 5%, at least 10%, at least 15%, at least 20%, at least 25%, at least 30%, at least 35%, at least 40%, at least 45%, at least 50%, at least 55%, at least 60%, at least 65%, at least 70%, at least 75%, at least 80%, at least 85%, at least 90%, at least 95%, or at least 99% as measured by edited nucleobases. In some embodiments, an ABE8 base editor delivered by an mRNA system has higher base editing efficiency compared to an ABE8 base editor delivered by a plasmid or vector system. In some embodiments, any of the ABE8 base editor variants described herein has at least 1%, at least 2%, at least 3%, at least 4%, at least 5%, at least 10%, at least 15%, at least 20%, at least 25%, at least 30%, at least 35%, at least 40%, at least 45%, at least 50%, at least 55%, at least 60%, at least 65%, at least 70%, at least 75%, at least 80%, at least 85%, at least 90%, at least 95%, at least 99%, at least 100%, at least 105%, at least 110%, at least 115%, at least 120%, at least 125%, at least 130%, at least 135%, at least 140%, at least 145%, at least 150%, at least 155%, at least 160%, at least 165%, at least 170%, at least 175%, at least 180%, at least 185%, at least 190%, at least 195%, at least 200%, at least 210%, at least 220%, at least 230%, at least 240%, at least 250%, at least 260%, at least 270%, at least 280%, at least 290%, at least 300% higher, at least 310%, at least 320%, at least 330%, at least 340%, at least 350%, at least 360%, at least 370%, at least 380%, at least 390%, at least 400%, at least 450%, or at least 500% on-target editing efficiency when delivered by an mRNA system compared to when delivered by a plasmid or vector system. In some embodiments, any of the ABE8 base editor variants described herein has at least 1.1 fold, at least 1.2 fold, at least 1.3 fold, at least 1.4 fold, at least 1.5 fold, at least 1.6 fold, at least 1.7 fold, at least 1.8 fold, at least 1.9 fold, at least 2.0 fold, at least 2.1 fold, at least 2.2 fold, at least 2.3 fold, at least 2.4 fold, at least 2.5 fold, at least 2.6 fold, at least 2.7 fold, at least 2.8 fold, at least 2.9 fold, at least 3.0 fold, at least 3.1 fold, at least 3.2 fold, at least 3.3 fold, at least 3.4 fold, at least 3.5 fold, at least 3.6 fold, at least 3.7 fold, at least 3.8 fold, at least 3.9 fold, at least 4.0 fold, at least 4.1 fold, at least 4.2 fold, at least 4.3 fold, at least 4.4 fold, at least 4.5 fold, at least 4.6 fold, at least 4.7 fold, at least 4.8 fold, at least 4.9 fold, or at least 5.0 fold higher on-target editing efficiency when delivered by an mRNA system compared to when delivered by a plasmid or vector system.

[0757] In some embodiments, any of the base editor systems comprising one of the ABE8 base editor variants described herein result in less than 50%, less than 40%, less than 30%, less than 20%, less than 19%, less than 18%, less than 17%, less than 16%, less than 15%, less than 14%, less than 13%, less than 12%, less than 11%, less than 10%, less than 9%, less than 8%, less than 7%, less than 6%, less than 5%, less than 4%, less than 3%, less than 2%, less than 1%, less than 0.9%, less than 0.8%, less than 0.7%, less than 0.6%, less than 0.5%, less than 0.4%, less than 0.3%, less than 0.2%, less than 0.1%, less than 0.09%, less than 0.08%, less than 0.07%, less than 0.06%, less than 0.05%, less than 0.04%, less than 0.03%, less than 0.02%, or less than 0.01% off-target editing in the target polynucleotide sequence.

[0758] In some embodiments, any of the ABE8 base editor variants described herein has lower guided off-target editing efficiency when delivered by an mRNA system compared to when delivered by a plasmid or vector system. In some embodiments, any of the ABE8 base editor variants described herein has at least 1%, at least 2%, at least 3%, at least 4%, at least 5%, at least 10%, at least 15%, at least 20%, at least 25%, at least 30%, at least 35%, at least 40%, at least 45%, at least 50%, at least 55%, at least 60%, at least 65%, at least 70%, at least 75%, at least 80%, at least 85%, at least 90%, at least 95%, or at least 99% lower guided off-target editing efficiency when delivered by an mRNA system compared to when delivered by a plasmid or vector system. In some embodiments, any of the ABE8 base editor variants described herein has at least 1.1 fold, at least 1.2 fold, at least 1.3 fold, at least 1.4 fold, at least 1.5 fold, at least 1.6 fold, at least 1.7 fold, at least 1.8 fold, at least 1.9 fold, at least 2.0 fold, at least 2.1 fold, at least 2.2 fold, at least 2.3 fold, at least 2.4 fold, at least 2.5 fold, at least 2.6 fold, at least 2.7 fold, at least 2.8 fold, at least 2.9 fold, or at least 3.0 fold lower guided off-target editing efficiency when delivered by an mRNA system compared to when delivered by a plasmid or vector system. In some embodiments, any of the ABE8 base editor variants described herein has at least about 2.2 fold decrease in guided off-target editing efficiency when delivered by an mRNA system compared to when delivered by a plasmid or vector system.

[0759] In some embodiments, any of the ABE8 base editor variants described herein has lower guide-independent off-target editing efficiency when delivered by an mRNA system compared to when delivered by a plasmid or vector system. In some embodiments, any of the ABE8 base editor variants described herein has at least 1%, at least 2%, at least 3%, at least 4%, at least 5%, at least 10%, at least 15%, at least 20%, at least 25%, at least 30%, at least 35%, at least 40%, at least 45%, at least 50%, at least 55%, at least 60%, at least 65%, at least 70%, at least 75%, at least 80%, at least 85%, at least 90%, at least 95%, or at least 99% lower guide-independent off-target editing efficiency when delivered by an mRNA system compared to when delivered by a plasmid or vector system. In some embodiments, any of the ABE8 base editor variants described herein has at least 1.1 fold, at least 1.2 fold, at least 1.3 fold, at least 1.4 fold, at least 1.5 fold, at least 1.6 fold, at least 1.7 fold, at least 1.8 fold, at least 1.9 fold, at least 2.0 fold, at least 2.1 fold, at least 2.2 fold, at least 2.3 fold, at least 2.4 fold, at least 2.5 fold, at least 2.6 fold, at least 2.7 fold, at least 2.8 fold, at least 2.9 fold, at least 3.0 fold, at least 5.0 fold, at least 10.0 fold, at least 20.0 fold, at least 50.0 fold, at least 70.0 fold, at least 100.0 fold, at least 120.0 fold, at least 130.0 fold, or at least 150.0 fold lower guide-independent off-target editing efficiency when delivered by an mRNA system compared to when delivered by a plasmid or vector system. In some embodiments, ABE8 base editor variants described herein has 134.0 fold decrease in guide-independent off-target editing efficiency (e.g., spurious RNA deamination) when delivered by an mRNA system compared to when delivered by a plasmid or vector system. In some embodiments, ABE8 base editor variants described herein does not increase guide-independent mutation rates across the genome.

[0760] In some embodiments, a single gene delivery event (e.g., by transduction, transfection, electroporation or any other method) can be used to target base editing of 5 sequences within a cell's genome. In some embodiments, a single gene delivery event can be used to target base editing of 6 sequences within a cell's genome. In some embodiments, a single gene delivery event can be used to target base editing of 7 sequences within a cell's genome. In some embodiments, a single electroporation event can be used to target base editing of 8 sequences within a cell's genome. In some embodiments, a single gene delivery event can be used to target base editing of 9 sequences within a cell's genome. In some embodiments, a single gene delivery event can be used to target base editing of 10 sequences within a cell's genome. In some embodiments, a single gene delivery event can be used to target base editing of 20 sequences within a cell's genome. In some embodiments, a single gene delivery event can be used to target base editing of 30 sequences within a cell's genome. In some embodiments, a single gene delivery event can be used to target base editing of 40 sequences within a cell's genome. In some embodiments, a single gene delivery event can be used to target base editing of 50 sequences within a cell's genome.

[0761] In some embodiments, the method described herein, for example, the base editing methods has minimum to no off-target effects.

[0762] In some embodiments, the base editing method described herein results in at least 50% of a cell population that have been successfully edited (i.e., cells that have been successfully engineered). In some embodiments, the base editing method described herein results in at least 55% of a cell population that have been successfully edited. In some embodiments, the base editing method described herein results in at least 60% of a cell population that have been successfully edited. In some embodiments, the base editing method described herein results in at least 65% of a cell population that have been successfully edited. In some embodiments, the base editing method described herein results in at least 70% of a cell population that have been successfully edited. In some embodiments, the base editing method described herein results in at least 75% of a cell population that have been successfully edited. In some embodiments, the base editing method described herein results in at least 80% of a cell population that have been successfully edited. In some embodiments, the base editing method described herein results in at least 85% of a cell population that have been successfully edited. In some embodiments, the base editing method described herein results in at least 90% of a cell population that have been successfully edited. In some embodiments, the base editing method described herein results in at least 95% of a cell population that have been successfully edited. In some embodiments, the base editing method described herein results in about 91%, 92%, 93%, 94%, 95%, 96%, 97%, 98%, 99% or 100% of a cell population that have been successfully edited.

[0763] In some embodiments, the live cell recovery following a base editing intervention is greater than at least 60%, 70%, 80%, 90% of the starting cell population at the time of the base editing event. In some embodiments, the live cell recovery as described above is about 70%. In some embodiments, the live cell recovery as described above is about 75%. In some embodiments, the live cell recovery as described above is about 80%. In some embodiments, the live cell recovery as described above is about 85%. In some embodiments, the live cell recovery as described above is about 90%, or about 91%, 92%, 93%, 94% 95%, 96%, 97%, 98%, or 99%, or 100% of the cells in the population at the time of the base editing event.

[0764] In some embodiments the engineered cell population can be further expanded in vitro by about 2 fold, about 3-fold, about 4-fold, about 5-fold, about 6-fold, about 7-fold, about 8-fold, about 9-fold, about 10-fold, about 15-fold, about 20-fold, about 25-fold, about 30-fold, about 35-fold, about 40-fold, about 45-fold, about 50-fold, or about 100-fold.

[0765] The number of intended mutations and indels can be determined using any suitable method, for example, as described in International PCT Application Nos. PCT/2017/045381 (WO2018/027078) and PCT/US2016/058344 (WO2017/070632); Komor, A. C., et al., “Programmable editing of a target base in genomic DNA without double-stranded DNA cleavage” Nature 533, 420-424 (2016); Gaudelli, N. M., et al., “Programmable base editing of A•T to G•C in genomic DNA without DNA cleavage” Nature 551, 464-471 (2017); and Komor, A. C., et al., “Improved base excision repair inhibition and bacteriophage Mu Gam protein yields C:G-to-T:A base editors with higher efficiency and product purity” Science Advances 3:eaao4774 (2017); the entire contents of which are hereby incorporated by reference.

[0766] In some embodiments, to calculate indel frequencies, sequencing reads are scanned for exact matches to two 10-bp sequences that flank both sides of a window in which indels can occur. If no exact matches are located, the read is excluded from analysis. If the length of this indel window exactly matches the reference sequence the read is classified as not containing an indel. If the indel window is two or more bases longer or shorter than the reference sequence, then the sequencing read is classified as an insertion or deletion, respectively. In some embodiments, the base editors provided herein can limit formation of indels in a region of a nucleic acid. In some embodiments, the region is at a nucleotide targeted by a base editor or a region within 2, 3, 4, 5, 6, 7, 8, 9, or 10 nucleotides of a nucleotide targeted by a base editor.

[0767] The number of indels formed at a target nucleotide region can depend on the amount of time a nucleic acid (e.g., a nucleic acid within the genome of a cell) is exposed to a base editor. In some embodiments, the number or proportion of indels is determined after at least 1 hour, at least 2 hours, at least 6 hours, at least 12 hours, at least 24 hours, at least 36 hours, at least 48 hours, at least 3 days, at least 4 days, at least 5 days, at least 7 days, at least 10 days, or at least 14 days of exposing the target nucleotide sequence (e.g., a nucleic acid within the genome of a cell) to a base editor. It should be appreciated that the characteristics of the base editors as described herein can be applied to any of the fusion proteins, or methods of using the fusion proteins provided herein.

[0768] Details of base editor efficiency are described in International PCT Application Nos. PCT/2017/045381 (WO 2018/027078) and PCT/US2016/058344 (WO 2017/070632), each of which is incorporated herein by reference for its entirety. Also see Komor, A. C., et al., “Programmable editing of a target base in genomic DNA without double-stranded DNA cleavage” Nature 533, 420-424 (2016); Gaudelli, N. M., et al., “Programmable base editing of A•T to G•C in genomic DNA without DNA cleavage” Nature 551, 464-471 (2017); and Komor, A. C., et al., “Improved base excision repair inhibition and bacteriophage Mu Gam protein yields C:G-to-T:A base editors with higher efficiency and product purity” Science Advances 3:eaao4774 (2017), the entire contents of which are hereby incorporated by reference. In some embodiments, editing of a plurality of nucleobase pairs in one or more genes using the methods provided herein results in formation of at least one intended mutation. In some embodiments, said formation of said at least one intended mutation results in the disruption the normal function of a gene. In some embodiments, said formation of said at least one intended mutation results decreases or eliminates the expression of a protein encoded by a gene. It should be appreciated that multiplex editing can be accomplished using any method or combination of methods provided herein.

### Multiplex Editing

[0769] In some embodiments, the base editor system provided herein is capable of multiplex editing of a plurality of nucleobase pairs in one or more genes or polynucleotide sequences. In some embodiments, the plurality of nucleobase pairs is located in the same gene or in one or more genes, wherein at least one gene is located in a different locus. In some embodiments, the multiplex editing can comprise one or more guide polynucleotides. In some embodiments, the multiplex editing can comprise one or more base editor systems. In some embodiments, the multiplex editing can comprise one or more base editor systems with a single guide polynucleotide or a plurality of guide polynucleotides. In some embodiments, the multiplex editing can comprise one or more guide polynucleotides with a single base editor system. In some embodiments, the multiplex editing can comprise at least one guide polynucleotide that does or does not require a PAM sequence to target binding to a target polynucleotide sequence. In some embodiments, the multiplex editing can comprise a mix of at least one guide polynucleotide that does not require a PAM sequence to target binding to a target polynucleotide sequence and at least one guide polynucleotide that require a PAM sequence to target binding to a target polynucleotide sequence. It should be appreciated that the characteristics of the multiplex editing using any of the base editors as described herein can be applied to any combination of methods using any base editor provided herein. It should also be appreciated that the multiplex editing using any of the base editors as described herein can comprise a sequential editing of a plurality of nucleobase pairs.

[0770] In some embodiments, the plurality of nucleobase pairs are in one more genes. In some embodiments, the plurality of nucleobase pairs is in the same gene. In some embodiments, at least one gene in the one more genes is located in a different locus.

[0771] In some embodiments, the editing is editing of the plurality of nucleobase pairs in at least one protein coding region, in at least one protein non-coding region, or in at least one protein coding region and at least one protein non-coding region.

[0772] In some embodiments, the editing is in conjunction with one or more guide polynucleotides. In some embodiments, the base editor system can comprise one or more base editor systems. In some embodiments, the base editor system can comprise one or more base editor systems in conjunction with a single guide polynucleotide or a plurality of guide polynucleotides. In some embodiments, the editing is in conjunction with one or more guide polynucleotide with a single base editor system. In some embodiments, the editing is in conjunction with at least one guide polynucleotide that does not require a PAM sequence to target binding to a target polynucleotide sequence or with at least one guide polynucleotide that requires a PAM sequence to target binding to a target polynucleotide sequence, or with a mix of at least one guide polynucleotide that does not require a PAM sequence to target binding to a target polynucleotide sequence and at least one guide polynucleotide that does require a PAM sequence to target binding to a target polynucleotide sequence. It should be appreciated that the characteristics of the multiplex editing using any of the base editors as described herein can be applied to any of combination of the methods of using any of the base editors provided herein. It should also be appreciated that the editing can comprise a sequential editing of a plurality of nucleobase pairs.

[0773] In some embodiments, the base editor system capable of multiplex editing of a plurality of nucleobase pairs in one or more genes comprises one of ABE7, ABE8, and/or ABE9 base editors. In some embodiments, the base editor system capable of multiplex editing comprising one of the ABE8 base editor variants described herein has higher multiplex editing efficiency compared to the base editor system capable of multiplex editing comprising one of ABE7 base editors. In some embodiments, the base editor system capable of multiplex editing comprising one of the ABE8 base editor variants described herein has at least 1%, at least 2%, at least 3%, at least 4%, at least 5%, at least 10%, at least 15%, at least 20%, at least 25%, at least 30%, at least 35%, at least 40%, at least 45%, at least 50%, at least 55%, at least 60%, at least 65%, at least 70%, at least 75%, at least 80%, at least 85%, at least 90%, at least 95%, at least 99%, at least 100%, at least 105%, at least 110%, at least 115%, at least 120%, at least 125%, at least 130%, at least 135%, at least 140%, at least 145%, at least 150%, at least 155%, at least 160%, at least 165%, at least 170%, at least 175%, at least 180%, at least 185%, at least 190%, at least 195%, at least 200%, at least 210%, at least 220%, at least 230%, at least 240%, at least 250%, at least 260%, at least 270%, at least 280%, at least 290%, at least 300% higher, at least 310%, at least 320%, at least 330%, at least 340%, at least 350%, at least 360%, at least 370%, at least 380%, at least 390%, at least 400%, at least 450%, or at least 500% higher multiplex editing efficiency compared the base editor system capable of multiplex editing comprising one of ABE7 base editors. In some embodiments, the base editor system capable of multiplex editing comprising one of the ABE8 base editor variants described herein has at least 1.1 fold, at least 1.2 fold, at least 1.3 fold, at least 1.4 fold, at least 1.5 fold, at least 1.6 fold, at least 1.7 fold, at least 1.8 fold, at least 1.9 fold, at least 2.0 fold, at least 2.1 fold, at least 2.2 fold, at least 2.3 fold, at least 2.4 fold, at least 2.5 fold, at least 2.6 fold, at least 2.7 fold, at least 2.8 fold, at least 2.9 fold, at least 3.0 fold, at least 3.1 fold, at least 3.2 fold, at least 3.3 fold, at least 3.4 fold, at least 3.5 fold, at least 4.0 fold, at least 4.5 fold, at least 5.0 fold, at least 5.5 fold, or at least 6.0 fold higher multiplex editing efficiency compared the base editor system capable of multiplex editing comprising one of ABE7 base editors.

### Expression of Fusion Proteins in a Host Cell

[0774] Fusion proteins of the invention comprising an adenosine deaminase variant may be expressed in virtually any host cell of interest, including but not limited to animal cells using routine methods known to the skilled artisan. For example, a DNA encoding an adenosine deaminase of the invention can be cloned by designing suitable primers for the upstream and downstream of CDS based on the cDNA sequence. The cloned DNA may be directly, or after digestion with a restriction enzyme when desired, or after addition of a suitable linker and/or a nuclear localization signal, ligated with a DNA encoding one or more additional components of a base editing system. The base editing system is translated in a host cell to form a complex.

[0775] A DNA encoding a protein domain described herein can be obtained by chemically synthesizing the DNA, or by connecting synthesized partly overlapping oligoDNA short chains by utilizing the PCR method and the Gibson Assembly method to construct a DNA encoding the full length thereof. The advantage of constructing a full-length DNA by chemical synthesis or a combination of PCR method or Gibson Assembly method is that the codon to be used can be designed in CDS full-length according to the host into which the DNA is introduced. In the expression of a heterologous DNA, the protein expression level is expected to increase by converting the DNA sequence thereof to a codon highly frequently used in the host organism. As the data of codon use frequency in host to be used, for example, the genetic code use frequency database (kazusa.or.jp/codon/index.html) disclosed in the home page of Kazusa DNA Research Institute can be used, or documents showing the codon use frequency in each host may be referred to. By reference to the obtained data and the DNA sequence to be introduced, codons showing low use frequency in the host from among those used for the DNA sequence may be converted to a codon coding the same amino acid and showing high use frequency.

[0776] An expression vector containing a DNA encoding a nucleic acid sequence-recognizing module and/or a nucleic acid base converting enzyme can be produced, for example, by linking the DNA to the downstream of a promoter in a suitable expression vector.

[0777] As the expression vector, animal cell expression plasmids (e.g., pA1-11, pXT1, pRc/CMV, pRc/RSV, pcDNAI/Neo) are known in the art; animal virus vectors such as retrovirus, vaccinia virus, adenovirus and the like, and the like are used.

[0778] Regarding the promoter to be used, any promoter appropriate for a host to be used for gene expression can be used. In a conventional method using double-stranded breaks, since the survival rate of the host cell sometimes decreases markedly due to the toxicity, it is desirable to increase the number of cells by the start of the induction by using an inductive promoter. However, since sufficient cell proliferation can also be afforded by expressing the nucleic acid-modifying enzyme complex of the present invention, a constitutive promoter can be used without limitation.

[0779] For example, when the host is an animal cell, an SR.alpha. promoter, SV40 promoter, LTR promoter, cytomegalovirus (CMV) promoter, Rous sarcoma virus (RSV) promoter, Moloney mouse leukemia virus (MoMuLV), LTR, herpes simplex virus thymidine kinase (HSV-TK) promoter, and the like can be used. Of these, CMV promoter, SR.alpha. promoter and the like are preferable.

[0780] Expression vectors for use in the present invention, besides those mentioned above, can comprise an enhancer, a splicing signal, a terminator, a polyA addition signal, a selection marker such as drug resistance gene, an auxotrophic complementary gene and the like, a replication origin, and the like can be used.

[0781] An RNA encoding a protein domain described herein can be prepared by, for example, in vitro transcription of a nucleic acid sequence encoding any of the fusion proteins disclosed herein.

[0782] A fusion protein of the invention can be intracellularly expressed by introducing into the cell an expression vector comprising a nucleic acid sequence encoding the fusion protein.

[0783] Mammalian cells contemplated in the present invention include, but are not limited to, cell lines such as Human Embryonic Kidney (HEK) cells, monkey COS-7 cells, monkey Vero cells, Chinese hamster ovary (CHO) cells, dhfr gene-deficient CHO cells, mouse L cells, mouse AtT-20 cells, mouse myeloma cells, rat GH3 cells, human FL cells and the like, pluripotent stem cells such as iPS cells, ES cells derived humans and other mammals, and primary cultured cells prepared from various tissues. Furthermore, zebrafish embryo, Xenopus oocyte, and the like can also be used.

[0784] Using conventional methods, mutations, in principle, introduced into only one homologous chromosome produce a heterogenous cell. Therefore, the desired phenotype is not expressed unless the mutation is dominant. For recessive mutations, acquiring a homozygous cell can be inconvenient due to labor and time requirements. In contrast, according to the present invention, since a mutation can be introduced into any allele on the homologous chromosome in the genome, the desired phenotype can be expressed in a single generation even in the case of recessive mutation, thereby solving the problem associated with conventional mutagenesis methods.

[0785] An expression vector can be introduced by a known method (e.g., the lysozyme method, the competent method, the PEG method, the CaCl₂) coprecipitation method, electroporation, microinjection, particle gun method, lipofection, Agrobacterium-mediated delivery, etc.) according to the kind of the host.

[0786] A vector can be introduced into an animal cell according to the methods described in, for example, Cell Engineering additional volume 8, New Cell Engineering Experiment Protocol, 263-267 (1995) (published by Shujunsha), and Virology, 52, 456 (1973).

[0787] A cell comprising a vector can be cultured according to a known method according to the kind of the host.

[0788] As a medium for culturing an animal cell, for example, minimum essential medium (MEM) containing about 5 to about 20% of fetal bovine serum [Science, 122, 501 (1952)], Dulbecco's modified Eagle medium (DMEM) [Virology, 8, 396 (1959)], RPMI 1640 medium [The Journal of the American Medical Association, 199, 519 (1967)], 199 medium [Proceeding of the Society for the Biological Medicine, 73, 1 (1950)] and the like are used. The pH of the medium is preferably about 6 to about 8. The culture is performed at generally about 30° C. to about 40° C. Where necessary, aeration and stirring may be performed.

[0789] When a higher eukaryotic cell, such as animal cell, is used as a host cell, a DNA encoding a base editing system of the present invention (e.g., comprising an adenosine deaminase variant) is introduced into a host cell under the regulation of an inducible promoter (e.g., metallothionein promoter (induced by heavy metal ion), heat shock protein promoter (induced by heat shock), Tet-ON/Tet-OFF system promoter (induced by addition or removal of tetracycline or a derivative thereof), steroid-responsive promoter (induced by steroid hormone or a derivative thereof) etc.), the induction substance is added to the medium (or removed from the medium) at an appropriate stage to induce expression of the nucleic acid-modifying enzyme complex, culture is performed for a given period to carry out a base editing and, introduction of a mutation into a target gene, transient expression of the base editing system can be realized.

[0790] Alternatively, the above-mentioned inductive promoter can also be utilized as a vector removal mechanism when higher eukaryotic cells, such as animal cell are used as a host cell. That is, a vector is mounted with a replication origin that functions in a host cell, and a nucleic acid encoding a protein necessary for replication (e.g., SV40 on and large T antigen, oriP and EBNA-1 etc. for animal cells), of the expression of the nucleic acid encoding the protein is regulated by the above-mentioned inducible promoter. As a result, while the vector is autonomously replicable in the presence of an induction substance, when the induction substance is removed, autonomous replication is not available, and the vector naturally falls off along with cell division (autonomous replication is not possible by the addition of tetracycline and doxycycline in Tet-OFF system vector).

### Reducing Expression of Target Genes in Cells

[0791] In some embodiments, provided herein is a liver cell with at least one modification in an endogenous gene or one or more regulatory elements thereof. In some embodiments, the cell may comprise a further modification in at least one, two, three, four, five, six, seven, eight, nine, ten, eleven, twelve, thirteen, fourteen, fifteen, sixteen, seventeen, eighteen, nineteen, twenty or more endogenous genes or regulatory elements thereof. In some embodiments, the at least one modification is a single nucleobase modification. In some embodiments, the at least one modification is generated by base editing. The base editing may be positioned at any suitable position of the gene, or in a regulatory element of the gene. Thus, it may be appreciated that a single base editing at a start codon, for example, can completely abolish the expression of the gene. In some embodiments, the base editing may be performed at a site within an exon. In some embodiments, the base editing may be performed at a site on more than one exons. In some embodiments, the base editing may be performed at any exon of the multiple exons in a gene. In some embodiments, base editing may introduce a premature STOP codon into an exon, resulting in either lack of a translated product or in a truncated that may be misfolded and thereby eliminated by degradation, or may produce an unstable mRNA that is readily degraded. In some embodiments, the cell is a hepatocyte.

[0792] In some embodiments, the gene is a KLKB1 polynucleotide.

[0793] In some embodiments, the editing of the endogenous gene reduces expression of the gene. In some embodiments, the editing of the endogenous gene reduces expression of the gene by at least 50% as compared to a control cell without the modification. In some embodiments, the editing of the endogenous gene reduces expression of the gene by at least 60% as compared to a control cell without the modification. In some embodiments, the editing of the endogenous gene reduces expression of the gene by at least 70% as compared to a control cell without the modification. In some embodiments, the editing of the endogenous gene reduces expression of the gene by at least 80% as compared to a control cell without the modification. In some embodiments, the editing of the endogenous gene reduces expression of the gene by at least 90% as compared to a control cell without the modification. In some embodiments, the editing of the endogenous gene reduces expression of the gene by at least 100% as compared to a control cell without the modification. In some embodiments, the editing of the endogenous gene eliminates gene expression.

[0794] In some embodiments, base editing may be performed on an intron. For example, base editing may be performed on an intron. In some embodiments, the base editing may be performed at a site within an intron. In some embodiments, the base editing may be performed at a site one or more introns. In some embodiments, the base editing may be performed at any exon of the multiple introns in a gene. In some embodiments, one or more base editing may be performed on an exon, an intron or any combination of exons and introns.

[0795] In some embodiments, the modification or base edit may be within a promoter site. In some embodiments, the base edit may be introduced within an alternative promoter site. In some embodiments, the base edit may be in a 5′ regulatory element, such as an enhancer. In some embodiment, base editing may be introduced to disrupt the binding site of a nucleic acid binding protein. Exemplary nucleic acid binding proteins may be a polymerase, nuclease, gyrase, topoisomerase, methylase or methyl transferase, transcription factors, enhancer, PABP, zinc finger proteins, among many others.

[0796] In some embodiments, base editing may be used for splice disruption to silence target protein expression. In some embodiments, base editing may generate a splice acceptor-splice donor (SA-SD) site. Targeted base editing generating a SA-SD, or at a SA-SD site can result in reduced expression of a gene. In some embodiments, base editors (e.g., ABE, CBE) are used to target dinucleotide motifs that constitute splice acceptor and splice donor sites, which are the first and last two nucleotides of each intron. In some embodiments, splice disruption is achieved with an adenosine base editor (ABE). In some embodiments, splice disruption is achieved with a cytidine base editor (CBE). In some embodiments, base editors (e.g., ABE, CBE) are used to edit exons by creating STOP codons.

[0797] In some embodiments, provided herein is an liver with at least one modification in one or more endogenous genes. In some embodiments, the liver cell may have at least one modification in one, two, three, four, five, six, seven, eight, nine, ten, eleven, twelve, thirteen, fourteen, fifteen, sixteen, seventeen, eighteen, nineteen, twenty or more endogenous genes. In some embodiments, the modification generates a premature stop codon in the endogenous genes. In some embodiments, the STOP codon silences target protein expression. In some embodiments, the modification is a single base modification. In some embodiments, the modification is generated by base editing. The premature stop codon may be generated in an exon, an intron, or an untranslated region. In some embodiments, base editing may be used to introduce more than one STOP codon, in one or more alternative reading frames. In some embodiments, the stop codon is generated by a adenosine base editor (ABE). In some embodiments, the stop codon is generated by a cytidine base editor (CBE). In some embodiments, the CBE generates any one of the following edits (shown in underlined font) to generate a STOP codon: CAG→TAG; CAA→TAA; CGA→TGA; TGG→TGA; TGG→TAG; or TGG→TAA.

[0798] In some embodiments, modification/base edits may be introduced at a 3′-UTR, for example, in a poly adenylation (poly-A) site. In some embodiments, base editing may be performed on a 5′-UTR region.

### Delivery System

[0799] The suitability of nucleobase editors to target one or more nucleotides in a polynucleotide sequence (e.g., a KLKB1 polynucleotide) is evaluated as described herein. In one embodiment, a single cell of interest is transfected, transduced, or otherwise modified with a nucleic acid molecule or molecules encoding a base editing system described herein together with a small amount of a vector encoding a reporter (e.g., GFP). These cells can be any cell line known in the art, including hepatocytes or HEK293T cells. Alternatively, primary cells (e.g., human) may be used. Cells may also be obtained from a subject or individual, such as from tissue biopsy, surgery, blood, plasma, serum, or other biological fluid. Such cells may be relevant to the eventual cell target.

[0800] Delivery may be performed using a lipid nanoparticle (LNP). In embodiments, the LNP contains an mRNA encoding an editor or editor system and/or a gRNA and/or a nucleic acid encoding a gRNA.

[0801] Delivery may be performed using a ribonucleoprotein (RNP). The RNP comprises a polynucleotide programmable nucleotide binding domain (e.g., Cas9) in complex with a targeting gRNA.

[0802] Delivery may be performed using a viral vector. In one embodiment, transfection may be performed using lipid transfection (such as Lipofectamine or Fugene) or by electroporation. Following transfection, expression of a reporter (e.g., GFP) can be determined either by fluorescence microscopy or by flow cytometry to confirm consistent and high levels of transfection. These preliminary transfections can comprise different nucleobase editors to determine which combinations of editors give the greatest activity. The system can comprise one or more different vectors. In one embodiment, the base editor is codon optimized for expression of the desired cell type, preferentially a eukaryotic cell, preferably a mammalian cell or a human cell.

[0803] The activity of the nucleobase editor is assessed as described herein, i.e., by sequencing the genome of the cells to detect alterations in a target sequence. For Sanger sequencing, purified PCR amplicons are cloned into a plasmid backbone, transformed, miniprepped and sequenced with a single primer. Sequencing may also be performed using next generation sequencing (NGS) techniques. When using next generation sequencing, amplicons may be 300-500 bp with the intended cut site placed asymmetrically. Following PCR, next generation sequencing adapters and barcodes (for example Illumina multiplex adapters and indexes) may be added to the ends of the amplicon, e.g., for use in high throughput sequencing (for example on an Illumina MiSeq). The fusion proteins that induce the greatest levels of target specific alterations in initial tests can be selected for further evaluation.

[0804] In particular embodiments, the nucleobase editors are used to target polynucleotides of interest. In one embodiment, a nucleobase editor of the invention is delivered to cells (e.g., hepatocytes or HEK293T cells) in conjunction with one or more guide RNAs that are used to target one or more nucleic acid sequences of interest within the genome of a cell, thereby altering the target gene(s) (e.g., a KLKB1 polynucleotide). In some embodiments, a base editor is targeted by one or more guide RNAs to introduce one or more edits to the sequence of one or more genes of interest (e.g., a KLKB1 polynucleotide). In some embodiments, the one or more edits to the sequence of one or more genes of interest decrease or eliminate expression of the protein encoded by the gene in the host cell (e.g., a hepatocyte or HEK293T cell). In some embodiments, expression of one or more proteins encoded by one or more genes of interest (e.g., a KLKB1 polynucleotide) is completely knocked out or eliminated in the host cell ((e.g., hepatocytes or HEK293T1 cells).

[0805] In some embodiments, the host cell is selected from a bacterial cell, plant cell, insect cell, human cell, or mammalian cell. In some embodiments, the host cell is a mammalian cell. In some embodiments, the host cell is a human cell. In some embodiments, the cell is in vitro. In some embodiments, the cell is in vivo.

### Nucleic Acid-Based Delivery of Base Editor Systems

[0806] Nucleic acid molecules encoding a base editor system according to the present disclosure can be administered to subjects or delivered into cells in vitro or in vivo by art-known methods or as described herein. For example, a base editor system comprising a deaminase (e.g., cytidine or adenine deaminase) can be delivered by vectors (e.g., viral or non-viral vectors), or by naked DNA, DNA complexes, lipid nanoparticles, or a combination of the aforementioned compositions.

[0807] Nanoparticles, which can be organic or inorganic, are useful for delivering a base editor system or component thereof. Nanoparticles are well known in the art and any suitable nanoparticle can be used to deliver a base editor system or component thereof, or a nucleic acid molecule encoding such components. In one example, organic (e.g. lipid and/or polymer) nanoparticles are suitable for use as delivery vehicles in certain embodiments of this disclosure. Exemplary lipids for use in nanoparticle formulations, and/or gene transfer are shown in Table 17 (below).

TABLE 17
Lipids used for gene transfer.
Lipids Used for Gene Transfer

| Lipid | Abbreviation | Feature |
|---|---|---|
| 1,2-Dioleoyl-sn-glycero-3-phosphatidylcholine | DOPC | Helper |
| 1,2-Dioleoyl-sn-glycero-3-phosphatidylethanolamine | DOPE | Helper |
| Cholesterol | | Helper |
| N-[1-(2,3-Dioleyloxy)prophyl]N,N,N-trimethylammonium | DOTMA | Cationic |
| chloride | | |
| 1,2-Dioleoyloxy-3-trimethylammonium-propane | DOTAP | Cationic |
| Dioctadecylamidoglycylspermine | DOGS | Cationic |
| N-(3-Aminopropyl)-N,N-dimethyl-2,3-bis(dodecyloxy)-1- | GAP-DLRIE | Cationic |
| propanaminium bromide | | |
| Cetyltrimethylammonium bromide | CTAB | Cationic |
| 6-Lauroxyhexyl ornithinate | LHON | Cationic |
| 1-(2,3-Dioleoyloxypropyl)-2,4,6-trimethylpyridinium | 20c | Cationic |
| 2,3-Dioleyloxy-N-[2(sperminecarboxamido-ethyl]-N,N- | DOSPA | Cationic |
| dimethyl-1-propanaminium trifluoroacetate | | |
| 1,2-Dioley1-3-trimethylammonium-propane | DOPA | Cationic |
| N-(2-Hydroxyethyl)-N,N-dimethyl-2,3-bis(tetradecyloxy)-1- | MDRIE | Cationic |
| propanaminium bromide | | |
| Dimyristooxypropyl dimethyl hydroxyethyl ammonium bromide | DMRI | Cationic |
| 3β-[N-(N′,N′-Dimethylaminoethane)-carbamoyl]cholesterol | DC-Chol | Cationic |
| Bis-guanidium-tren-cholesterol | BGTC | Cationic |
| 1,3-Diodeoxy-2-(6-carboxy-spermyl)-propylamide | DOSPER | Cationic |
| Dimethyloctadecylammonium bromide | DDAB | Cationic |
| Dioctadecylamidoglicylspermidin | DSL | Cationic |
| rac-[(2,3-Dioctadecyloxypropyl)(2-hydroxyethyl)]- | CLIP-1 | Cationic |
| dimethylammonium chloride | | |
| rac-[2(2,3-Dihexadecyloxypropyl- | CLIP-6 | Cationic |
| oxymethyloxy)ethyl]trimethylammoniun bromide | | |
| Ethyldimyristoylphosphatidylcholine | EDMPC | Cationic |
| 1,2-Distearyloxy-N,N-dimethyl-3-aminopropane | DSDMA | Cationic |
| 1,2-Dimyristoyl-trimethylammonium propane | DMTAP | Cationic |
| O,O′-Dimyristyl-N-lysyl aspartate | DMKE | Cationic |
| 1,2-Distearoyl-sn-glycero-3-ethylpho sphocholine | DSEPC | Cationic |
| N-Palmitoyl D-erythro-sphingosyl carbamoyl-spermine | CCS | Cationic |
| N-t-Butyl-NO-tetradecyl-3-tetradecylaminopropionamidine | diC14-amidine | Cationic |
| Octadecenolyoxy[ethyl-2-heptadeceny1-3 hydroxyethyl] | DOTIM | Cationic |
| imidazolinium chloride | | |
| N1-Cholesteryloxycarbonyl-3,7-diazanonane-1,9-diamine | CDAN | Cationic |
| 2-(3-[Bis(3-amino-propyl)-amino]propylamino)-N- | RPR209120 | Cationic |
| ditetradecylcarbamoylme-ethyl-acetamide | | |
| 1,2-dilinoleyloxy-3-dimethylaminopropane | DLinDMA | Cationic |
| 2,2-dilinoley1-4-dimethylaminoethyl-[1,3]-dioxolane | DLin-KC2- | Cationic |
| | DMA | |
| dilinoleyl-methyl-4-dimethylaminobutyrate | DLin-MC3- | Cationic |
| | DMA | |

[0808] Table 18 lists exemplary polymers for use in gene transfer and/or nanoparticle formulations.

TABLE 18
Polymers used for gene transfer.
Polymers Used for Gene Transfer

| Polymer | Abbreviation |
|---|---|
| Poly(ethylene)glycol | PEG |
| Polyethylenimine | PEI |
| Dithiobis (succinimidylpropionate) | DSP |
| Dimethyl-3,3′-dithiobispropionimidate | DTBP |
| Poly(ethylene imine)biscarbamate | PEIC |
| Poly(L-lysine) | PLL |
| Histidine modified PLL | |
| Poly(N-vinylpyrrolidone) | PVP |
| Poly(propylenimine) | PPI |
| Poly(amidoamine) | PAMAM |
| Poly(amidoethylenimine) | SS-PAEI |
| Triethylenetetramine | TETA |
| Poly(β-aminoester) | |
| Poly(4-hydroxy-L-proline ester) | PHP |
| Poly(allylamine) | |
| Poly(α-[4-aminobutyl]-L-glycolic acid) | PAGA |
| Poly(D,L-lactic-co-glycolic acid) | PLGA |
| Poly(N-ethyl-4-vinylpyridinium bromide) | |
| Poly(phosphazene)s | PPZ |
| Poly(phosphoester)s | PPE |
| Poly(phosphoramidate)s | PPA |
| Poly(N-2-hydroxypropylmethacrylamide) | pHPMA |
| Poly(2-(dimethylamino)ethyl methacrylate) | pDMAEMA |
| Poly(2-aminoethyl propylene phosphate) | PPE-EA |
| Chitosan | |
| Galactosylated chitosan | |
| N-Dodacylated chitosan | |
| Histone | |
| Collagen | |
| Dextran-spermine | D-SPM |

[0809] Table 19 summarizes delivery methods for a polynucleotide encoding a fusion protein described herein.

TABLE 19
Delivery methods.

| | | Delivery into | | | Type of |
|---|---|---|---|---|---|
| | | Non-Dividing | Duration of | Genome | Molecule |
| Delivery | Vector/Mode | Cells | Expression | Integration | Delivered |
| Physical | (e.g., | YES | Transient | NO | Nucleic Acids |
| | electroporation, | | | | and Proteins |
| | particle gun, | | | | |
| | Calcium | | | | |
| | Phosphate | | | | |
| | transfection | | | | |
| Viral | Retrovirus | NO | Stable | YES | RNA |
| | Lentivirus | YES | Stable | YES/NO with | RNA |
| | | | | modification | |
| | Adenovirus | YES | Transient | NO | DNA |
| | Adeno- | YES | Stable | NO | DNA |
| | Associated | | | | |
| | Virus (AAV) | | | | |
| | Vaccinia Virus | YES | Very | NO | DNA |
| | | | Transient | | |
| | Herpes Simplex | YES | Stable | NO | DNA |
| | Virus | | | | |
| Non-Viral | Cationic | YES | Transient | Depends on | Nucleic Acids |
| | Liposomes | | | what is | and Proteins |
| | | | | delivered | |
| | Polymeric | YES | Transient | Depends on | Nucleic Acids |
| | Nanoparticles | | | what is | and Proteins |
| | | | | delivered | |
| Biological | Attenuated | YES | Transient | NO | Nucleic Acids |
| Non-Viral | Bacteria | | | | |
| Delivery | Engineered | YES | Transient | NO | Nucleic Acids |
| Vehicles | Bacteriophages | | | | |
| | Mammalian | YES | Transient | NO | Nucleic Acids |
| | Virus-like | | | | |
| | Particles | | | | |
| | Biological | YES | Transient | NO | Nucleic Acids |
| | liposomes: | | | | |
| | Erythrocyte | | | | |
| | Ghosts and | | | | |
| | Exosomes | | | | |

[0810] In another aspect, the delivery of base editor system components or nucleic acids encoding such components, for example, a polynucleotide programmable nucleotide binding domain (e.g., Cas9) such as, for example, Cas9 or variants thereof, and a gRNA targeting a nucleic acid sequence of interest, may be accomplished by delivering the ribonucleoprotein (RNP) to cells. The RNP comprises a polynucleotide programmable nucleotide binding domain (e.g., Cas9), in complex with the targeting gRNA. RNPs or polynucleotides described herein may be delivered to cells using known methods, such as electroporation, nucleofection, or cationic lipid-mediated methods, for example, as reported by Zuris, J. A. et al., 2015, Nat. Biotechnology, 33(1):73-80, which is incorporated by reference in its entirety. RNPs are advantageous for use in CRISPR base editing systems, particularly for cells that are difficult to transfect, such as primary cells. In addition, RNPs can also alleviate difficulties that may occur with protein expression in cells, especially when eukaryotic promoters, e.g., CMV or EF1A, which may be used in CRISPR plasmids, are not well-expressed. Advantageously, the use of RNPs does not require the delivery of foreign DNA into cells. Moreover, because an RNP comprising a nucleic acid binding protein and gRNA complex is degraded over time, the use of RNPs has the potential to limit off-target effects. In a manner similar to that for plasmid based techniques, RNPs can be used to deliver binding protein (e.g., Cas9 variants) and to direct homology directed repair (HDR).

[0811] Nucleic acid molecules encoding a base editor system can be delivered directly to cells (e.g., hepatocytes or HEK293T cells) as naked DNA or RNA by means of transfection or electroporation, for example, or can be conjugated to molecules (e.g., N-acetylgalactosamine) promoting uptake by the target cells. Vectors encoding base editor systems and/or their components can also be used. In particular embodiments, a polynucleotide, e.g. a mRNA encoding a base editor system or a functional component thereof, may be co-electroporated with one or more guide RNAs as described herein.

[0812] Nucleic acid vectors can comprise one or more sequences encoding a domain of a fusion protein described herein. A vector can also encode a protein component of a base editor system operably linked to a nuclear localization signal, nucleolar localization signal, or mitochondrial localization signal. As one example, a vector can include a Cas9 coding sequence that includes one or more nuclear localization sequences (e.g., a nuclear localization sequence from SV40), and one or more deaminases.

[0813] The vector can also include any suitable number of regulatory/control elements, e.g., promoters, enhancers, introns, polyadenylation signals, Kozak consensus sequences, or internal ribosome entry sites (IRES). These elements are well known in the art.

[0814] Vectors according to this disclosure include recombinant viral vectors. Exemplary viral vectors are set forth herein above. Other viral vectors known in the art can also be used. In addition, viral particles can be used to deliver base editor system components in nucleic acid and/or protein form. For example, “empty” viral particles can be assembled to contain a base editor system or component as cargo. Viral vectors and viral particles can also be engineered to incorporate targeting ligands to alter target tissue specificity.

[0815] Vectors described herein may comprise regulatory elements to drive expression of a base editor system or component thereof. Such vectors include adeno-associated viruses with inverted long terminal repeats (AAV ITR). The use of AAV-ITR can be advantageous for eliminating the need for an additional promoter element, which can take up space in the vector. The additional space freed up can be used to drive the expression of additional elements, such as a guide nucleic acid or a selectable marker. ITR activity can be used to reduce potential toxicity due to over expression.

[0816] Any suitable promoter can be used to drive expression of a base editor system or component thereof and, where appropriate, the guide nucleic acid. For ubiquitous expression, promoters include CMV, CAG, CBh, PGK, SV40, Ferritin heavy or light chains. For brain or other CNS cell expression, suitable promoters include: SynapsinI for all neurons, CaMKIIalpha for excitatory neurons, GAD67 or GAD65 or VGAT for GABAergic neurons. For liver cell expression, suitable promoters include the Albumin promoter. For lung cell expression, suitable promoters include SP-B. For endothelial cells, suitable promoters include ICAM. For hematopoietic cell expression suitable promoters include IFNbeta or CD45. For osteoblast expression suitable promoters can include OG-2.

[0817] In some embodiments, a base editor system of the present disclosure is of small enough size to allow separate promoters to drive expression of the base editor and a compatible guide nucleic acid within the same nucleic acid molecule. For instance, a vector or viral vector can comprise a first promoter operably linked to a nucleic acid encoding the base editor and a second promoter operably linked to the guide nucleic acid.

[0818] The promoter used to drive expression of a guide nucleic acid can include: Pol III promoters, such as U6 or H1 Use of Pol II promoter and intronic cassettes to express gRNA Adeno Associated Virus (AAV).

[0819] In particular embodiments, a fusion protein of the invention is encoded by a polynucleotide present in a viral vector (e.g., adeno-associated virus (AAV), AAV3, AAV3b, AAV4, AAV5, AAV6, AAV7, AAV8, AAV9, AAVrh8, AAV10, and variants thereof), or a suitable capsid protein of any viral vector. Thus, in some aspects, the disclosure relates to the viral delivery of a fusion protein. Examples of viral vectors include retroviral vectors (e.g. Maloney murine leukemia virus, MML-V), adenoviral vectors (e.g. AD100), lentiviral vectors (HIV and FIV-based vectors), herpesvirus vectors (e.g. HSV-2).

[0820] In some aspects, the methods described herein for editing specific genes in a cell can be used to genetically modify the cell (e.g., a hepatocyte or HEK293T cell).

### Viral Vectors

[0821] A base editor described herein can be delivered with a viral vector. In some embodiments, a base editor disclosed herein can be encoded on a nucleic acid that is contained in a viral vector. In some embodiments, one or more components of the base editor system can be encoded on one or more viral vectors. For example, a base editor and guide nucleic acid can be encoded on a single viral vector. In other embodiments, the base editor and guide nucleic acid are encoded on different viral vectors. In either case, the base editor and guide nucleic acid can each be operably linked to a promoter and terminator. The combination of components encoded on a viral vector can be determined by the cargo size constraints of the chosen viral vector.

[0822] The use of RNA or DNA viral based systems for the delivery of a base editor takes advantage of highly evolved processes for targeting a virus to specific cells in culture or in the host and trafficking the viral payload to the nucleus or host cell genome. Viral vectors can be administered directly to cells in culture, patients (in vivo), or they can be used to treat cells in vitro, and the modified cells can optionally be administered to patients (ex vivo). Conventional viral based systems could include retroviral, lentivirus, adenoviral, adeno-associated and herpes simplex virus vectors for gene transfer. Integration in the host genome is possible with the retrovirus, lentivirus, and adeno-associated virus gene transfer methods, often resulting in long term expression of the inserted transgene. Additionally, high transduction efficiencies have been observed in many different cell types and target tissues.

[0823] Viral vectors can include lentivirus (e.g., HIV and FIV-based vectors), Adenovirus (e.g., AD100), Retrovirus (e.g., Maloney murine leukemia virus, MML-V), herpesvirus vectors (e.g., HSV-2), and Adeno-associated viruses (AAVs), or other plasmid or viral vector types, in particular, using formulations and doses from, for example, U.S. Pat. No. 8,454,972 (formulations, doses for adenovirus), U.S. Pat. No. 8,404,658 (formulations, doses for AAV) and U.S. Pat. No. 5,846,946 (formulations, doses for DNA plasmids) and from clinical trials and publications regarding the clinical trials involving lentivirus, AAV and adenovirus. For example, for AAV, the route of administration, formulation and dose can be as in U.S. Pat. No. 8,454,972 and as in clinical trials involving AAV. For Adenovirus, the route of administration, formulation and dose can be as in U.S. Pat. No. 8,404,658 and as in clinical trials involving adenovirus. For plasmid delivery, the route of administration, formulation and dose can be as in U.S. Pat. No. 5,846,946 and as in clinical studies involving plasmids. Doses can be based on or extrapolated to an average 70 kg individual (e.g. a male adult human), and can be adjusted for patients, subjects, mammals of different weight and species. Frequency of administration is within the ambit of the medical or veterinary practitioner (e.g., physician, veterinarian), depending on usual factors including the age, sex, general health, other conditions of the patient or subject and the particular condition or symptoms being addressed. The viral vectors can be injected into the tissue of interest. For cell-type specific base editing, the expression of the base editor and optional guide nucleic acid can be driven by a cell-type specific promoter.

[0824] The tropism of a retrovirus can be altered by incorporating foreign envelope proteins, expanding the potential target population of target cells. Lentiviral vectors are retroviral vectors that are able to transduce or infect non-dividing cells and typically produce high viral titers. Selection of a retroviral gene transfer system would therefore depend on the target tissue. Retroviral vectors are comprised of cis-acting long terminal repeats with packaging capacity for up to 6-10 kb of foreign sequence. The minimum cis-acting LTRs are sufficient for replication and packaging of the vectors, which are then used to integrate the therapeutic gene into the target cell to provide permanent transgene expression. Widely used retroviral vectors include those based upon murine leukemia virus (MuLV), gibbon ape leukemia virus (GaLV), Simian Immuno deficiency virus (SIV), human immuno deficiency virus (HIV), and combinations thereof (See, e.g., Buchscher et al., J. Virol. 66:2731-2739 (1992); Johann et al., J. Virol. 66:1635-1640 (1992); Sommnerfelt et al., Virol. 176:58-59 (1990); Wilson et al., J. Virol. 63:2374-2378 (1989); Miller et al., J. Virol. 65:2220-2224 (1991); PCT/US94/05700).

[0825] Retroviral vectors, especially lentiviral vectors, can require polynucleotide sequences smaller than a given length for efficient integration into a target cell. For example, retroviral vectors of length greater than 9 kb can result in low viral titers compared with those of smaller size. In some aspects, a base editor of the present disclosure is of sufficient size so as to enable efficient packaging and delivery into a target cell via a retroviral vector. In some embodiments, a base editor is of a size so as to allow efficient packing and delivery even when expressed together with a guide nucleic acid and/or other components of a targetable nuclease system.

[0826] Packaging cells are typically used to form virus particles that are capable of infecting a host cell. Such cells include 293 cells, which package adenovirus, and psi.2 cells or PA317 cells, which package retrovirus. Viral vectors used in gene therapy are usually generated by producing a cell line that packages a nucleic acid vector into a viral particle. The vectors typically contain the minimal viral sequences required for packaging and subsequent integration into a host, other viral sequences being replaced by an expression cassette for the polynucleotide(s) to be expressed. The missing viral functions are typically supplied in trans by the packaging cell line. For example, Adeno-associated virus (“AAV”) vectors used in gene therapy typically only possess ITR sequences from the AAV genome which are required for packaging and integration into the host genome. Viral DNA can be packaged in a cell line, which contains a helper plasmid encoding the other AAV genes, namely rep and cap, but lacking ITR sequences. The cell line can also be infected with adenovirus as a helper. The helper virus can promote replication of the AAV vector and expression of AAV genes from the helper plasmid. The helper plasmid in some cases is not packaged in significant amounts due to a lack of ITR sequences. Contamination with adenovirus can be reduced by, e.g., heat treatment to which adenovirus is more sensitive than AAV.

[0827] In applications where transient expression is preferred, adenoviral based systems can be used. Adenoviral based vectors are capable of very high transduction efficiency in many cell types and do not require cell division. With such vectors, high titer and levels of expression have been obtained. This vector can be produced in large quantities in a relatively simple system. AAV vectors can also be used to transduce cells with target nucleic acids, e.g., in the in vitro production of nucleic acids and peptides, and for in vivo and ex vivo gene therapy procedures (See, e.g., West et al., Virology 160:38-47 (1987); U.S. Pat. No. 4,797,368; WO 93/24641; Kotin, Human Gene Therapy 5:793-801 (1994); Muzyczka, J. Clin. Invest. 94:1351 (1994). The construction of recombinant AAV vectors is described in a number of publications, including U.S. Pat. No. 5,173,414; Tratschin et al., Mol. Cell. Biol. 5:3251-3260 (1985); Tratschin, et al., Mol. Cell. Biol. 4:2072-2081 (1984); Hermonat & Muzyczka, PNAS 81:6466-6470 (1984); and Samulski et al., J. Virol. 63:03822-3828 (1989).

[0828] In some embodiments, AAV vectors are used to transduce a cell of interest with a polynucleotide encoding a base editor or base editor system as provided herein. AAV is a small, single-stranded DNA dependent virus belonging to the parvovirus family. The 4.7 kb wild-type (wt) AAV genome is made up of two genes that encode four replication proteins and three capsid proteins, respectively, and is flanked on either side by 145-bp inverted terminal repeats (ITRs). The virion is composed of three capsid proteins, Vp1, Vp2, and Vp3, produced in a 1:1:10 ratio from the same open reading frame but from differential splicing (Vp1) and alternative translational start sites (Vp2 and Vp3, respectively). Vp3 is the most abundant subunit in the virion and participates in receptor recognition at the cell surface defining the tropism of the virus. A phospholipase domain, which functions in viral infectivity, has been identified in the unique N terminus of Vp1.

[0829] Similar to wt AAV, recombinant AAV (rAAV) utilizes the cis-acting 145-bp ITRs to flank vector transgene cassettes, providing up to 4.5 kb for packaging of foreign DNA. Subsequent to infection, rAAV can express a fusion protein of the invention and persist without integration into the host genome by existing episomally in circular head-to-tail concatemers. Although there are numerous examples of rAAV success using this system, in vitro and in vivo, the limited packaging capacity has limited the use of AAV-mediated gene delivery when the length of the coding sequence of the gene is equal or greater in size than the wt AAV genome.

[0830] Viral vectors can be selected based on the application. For example, for in vivo gene delivery, AAV can be advantageous over other viral vectors. In some embodiments, AAV allows low toxicity, which can be due to the purification method not requiring ultra-centrifugation of cell particles that can activate the immune response. In some embodiments, AAV allows low probability of causing insertional mutagenesis because it doesn't integrate into the host genome. Adenoviruses are commonly used as vaccines because of the strong immunogenic response they induce. Packaging capacity of the viral vectors can limit the size of the base editor that can be packaged into the vector.

[0831] AAV has a packaging capacity of about 4.5 Kb or 4.75 Kb including two 145 base inverted terminal repeats (ITRs). This means disclosed base editor as well as a promoter and transcription terminator can fit into a single viral vector. Constructs larger than 4.5 or 4.75 Kb can lead to significantly reduced virus production. For example, SpCas9 is quite large, the gene itself is over 4.1 Kb, which makes it difficult for packing into AAV. Therefore, embodiments of the present disclosure include utilizing a disclosed base editor which is shorter in length than conventional base editors. In some examples, the base editors are less than 4 kb. Disclosed base editors can be less than 4.5 kb, 4.4 kb, 4.3 kb, 4.2 kb, 4.1 kb, 4 kb, 3.9 kb, 3.8 kb, 3.7 kb, 3.6 kb, 3.5 kb, 3.4 kb, 3.3 kb, 3.2 kb, 3.1 kb, 3 kb, 2.9 kb, 2.8 kb, 2.7 kb, 2.6 kb, 2.5 kb, 2 kb, or 1.5 kb. In some embodiments, the disclosed base editors are 4.5 kb or less in length.

[0832] An AAV can be AAV1, AAV2, AAV5 or any combination thereof. One can select the type of AAV with regard to the cells to be targeted; e.g., one can select AAV serotypes 1, 2, 5 or a hybrid capsid AAV1, AAV2, AAV5 or any combination thereof for targeting brain or neuronal cells; and one can select AAV4 for targeting cardiac tissue. AAV8 is useful for delivery to the liver. A tabulation of certain AAV serotypes as to these cells can be found in Grimm, D. et al, J. Virol. 82: 5887-5911 (2008)).

[0833] In some embodiments, lentiviral vectors are used to transduce a cell of interest with a polynucleotide encoding a base editor or base editor system as provided herein. Lentiviruses are complex retroviruses that have the ability to infect and express their genes in both mitotic and post-mitotic cells. The most commonly known lentivirus is the human immunodeficiency virus (HIV), which uses the envelope glycoproteins of other viruses to target a broad range of cell types.

[0834] Lentiviruses can be prepared as follows. After cloning pCasES10 (which contains a lentiviral transfer plasmid backbone), HEK293FT at low passage (p=5) were seeded in a T-75 flask to 50% confluence the day before transfection in DMEM with 10% fetal bovine serum and without antibiotics. After 20 hours, media is changed to OptiMEM (serum-free) media and transfection was done 4 hours later. Cells are transfected with 10 μg of lentiviral transfer plasmid (pCasES10) and the following packaging plasmids: 5 μg of pMD2.G (VSV-g pseudotype), and 7.5 μg of psPAX2 (gag/pol/rev/tat). Transfection can be done in 4 mL OptiMEM with a cationic lipid delivery agent (50 μl Lipofectamine 2000 and 100 μl Plus reagent). After 6 hours, the media is changed to antibiotic-free DMEM with 10% fetal bovine serum. These methods use serum during cell culture, but serum-free methods are preferred.

[0835] Lentivirus can be purified as follows. Viral supernatants are harvested after 48 hours. Supernatants are first cleared of debris and filtered through a 0.45 μm low protein binding (PVDF) filter. They are then spun in an ultracentrifuge for 2 hours at 24,000 rpm. Viral pellets are resuspended in 50 μl of DMEM overnight at 4° C. They are then aliquoted and immediately frozen at −80° C.

[0836] In another embodiment, minimal non-primate lentiviral vectors based on the equine infectious anemia virus (EIAV) are also contemplated. In another embodiment, RetinoStat®, an equine infectious anemia virus-based lentiviral gene therapy vector that expresses angiostatic proteins endostatin and angiostatin that is contemplated to be delivered via a subretinal injection. In another embodiment, use of self-inactivating lentiviral vectors are contemplated.

[0837] Any RNA of the systems, for example a guide RNA or a base editor-encoding mRNA, can be delivered in the form of RNA. Base editor-encoding mRNA can be generated using in vitro transcription. For example, nuclease mRNA can be synthesized using a PCR cassette containing the following elements: T7 promoter, optional kozak sequence (GCCACC), nuclease sequence, and 3′ UTR such as a 3′ UTR from beta globin-polyA tail. The cassette can be used for transcription by T7 polymerase. Guide polynucleotides (e.g., gRNA) can also be transcribed using in vitro transcription from a cassette containing a T7 promoter, followed by the sequence “GG”, and guide polynucleotide sequence.

[0838] To enhance expression and reduce possible toxicity, the base editor-coding sequence and/or the guide nucleic acid can be modified to include one or more modified nucleoside e.g. using pseudo-U or 5-Methyl-C.

[0839] The small packaging capacity of AAV vectors makes the delivery of a number of genes that exceed this size and/or the use of large physiological regulatory elements challenging. These challenges can be addressed, for example, by dividing the protein(s) to be delivered into two or more fragments, wherein the N-terminal fragment is fused to a split intein-N and the C-terminal fragment is fused to a split intein-C. These fragments are then packaged into two or more AAV vectors. As used herein, “intein” refers to a self-splicing protein intron (e.g., peptide) that ligates flanking N-terminal and C-terminal exteins (e.g., fragments to be joined). The use of certain inteins for joining heterologous protein fragments is described, for example, in Wood et al., J. Biol. Chem. 289(21); 14512-9 (2014). For example, when fused to separate protein fragments, the inteins IntN and IntC recognize each other, splice themselves out and simultaneously ligate the flanking N- and C-terminal exteins of the protein fragments to which they were fused, thereby reconstituting a full-length protein from the two protein fragments. Other suitable inteins will be apparent to a person of skill in the art.

[0840] A fragment of a fusion protein of the invention can vary in length. In some embodiments, a protein fragment ranges from 2 amino acids to about 1000 amino acids in length. In some embodiments, a protein fragment ranges from about 5 amino acids to about 500 amino acids in length. In some embodiments, a protein fragment ranges from about 20 amino acids to about 200 amino acids in length. In some embodiments, a protein fragment ranges from about 10 amino acids to about 100 amino acids in length. Suitable protein fragments of other lengths will be apparent to a person of skill in the art.

[0841] In one embodiment, dual AAV vectors are generated by splitting a large transgene expression cassette in two separate halves (5′ and 3′ ends, or head and tail), where each half of the cassette is packaged in a single AAV vector (of <5 kb). The re-assembly of the full-length transgene expression cassette is then achieved upon co-infection of the same cell by both dual AAV vectors followed by: (1) homologous recombination (HR) between 5′ and 3′ genomes (dual AAV overlapping vectors); (2) ITR-mediated tail-to-head concatemerization of 5′ and 3′ genomes (dual AAV trans-splicing vectors); or (3) a combination of these two mechanisms (dual AAV hybrid vectors). The use of dual AAV vectors in vivo results in the expression of full-length proteins. The use of the dual AAV vector platform represents an efficient and viable gene transfer strategy for transgenes of >4.7 kb in size.

### Inteins

[0842] Inteins (intervening protein) are auto-processing domains found in a variety of diverse organisms, which carry out a process known as protein splicing. Protein splicing is a multi-step biochemical reaction comprised of both the cleavage and formation of peptide bonds. While the endogenous substrates of protein splicing are proteins found in intein-containing organisms, inteins can also be used to chemically manipulate virtually any polypeptide backbone.

[0843] In protein splicing, the intein excises itself out of a precursor polypeptide by cleaving two peptide bonds, thereby ligating the flanking extein (external protein) sequences via the formation of a new peptide bond. This rearrangement occurs post-translationally (or possibly co-translationally). Intein-mediated protein splicing occurs spontaneously, requiring only the folding of the intein domain.

[0844] About 5% of inteins are split inteins, which are transcribed and translated as two separate polypeptides, the N-intein and C-intein, each fused to one extein. Upon translation, the intein fragments spontaneously and non-covalently assemble into the canonical intein structure to carry out protein splicing in trans. The mechanism of protein splicing entails a series of acyl-transfer reactions that result in the cleavage of two peptide bonds at the intein-extein junctions and the formation of a new peptide bond between the N- and C-exteins. This process is initiated by activation of the peptide bond joining the N-extein and the N-terminus of the intein. Virtually all inteins have a cysteine or serine at their N-terminus that attacks the carbonyl carbon of the C-terminal N-extein residue. This N to O/S acyl-shift is facilitated by a conserved threonine and histidine (referred to as the TXXH motif), along with a commonly found aspartate, which results in the formation of a linear (thio)ester intermediate. Next, this intermediate is subject to trans-(thio)esterification by nucleophilic attack of the first C-extein residue (+1), which is a cysteine, serine, or threonine. The resulting branched (thio)ester intermediate is resolved through a unique transformation: cyclization of the highly conserved C-terminal asparagine of the intein. This process is facilitated by the histidine (found in a highly conserved HNF motif) and the penultimate histidine and may also involve the aspartate. This succinimide formation reaction excises the intein from the reactive complex and leaves behind the exteins attached through a non-peptidic linkage. This structure rapidly rearranges into a stable peptide bond in an intein-independent fashion.

[0845] Non-limiting examples of inteins include any intein or intein-pair known to one of ordinary skill in the art, which include a synthetic intein based on the dnaE intein, the Cfa-N (e.g., split intein-N) and Cfa-C (e.g., split intein-C) intein pair, has been described (e.g., in Stevens et al., J Am Chem Soc. 2016 Feb. 24; 138(7):2162-5, incorporated herein by reference), and DnaE. Non-limitine examples of pairs of inteins that may be used in accordance with the present disclosure include: Cfa DnaE intein, Ssp GyrB intein, Ssp DnaX intein, Ter DnaE3 intein, Ter ThyX intein, Rma DnaB intein and Cne Prp8 intein (e.g., as described in U.S. Pat. No. 8,394,604, incorporated herein by reference). Exemplary nucleotide and amino acid sequences of inteins are provided in the Sequence Listing at SEQ ID NOs: 370-377

[0846] Intein-N and intein-C may be fused to the N-terminal portion of a split Cas9 and the C-terminal portion of the split Cas9, respectively, for the joining of the N-terminal portion of the split Cas9 and the C-terminal portion of the split Cas9. For example, in some embodiments, an intein-N is fused to the C-terminus of the N-terminal portion of the split Cas9, i.e., to form a structure of N—[N-terminal portion of the split Cas9]-[intein-N]—C. In some embodiments, an intein-C is fused to the N-terminus of the C-terminal portion of the split Cas9, i.e., to form a structure of N-[intein-C]—[C-terminal portion of the split Cas9]-C. The mechanism of intein-mediated protein splicing for joining the proteins the inteins are fused to (e.g., split Cas9) is known in the art, e.g., as described in Shah et al., Chem Sci. 2014; 5(1):446-461, incorporated herein by reference. Methods for designing and using inteins are known in the art and described, for example by WO2014004336, WO2017132580, US20150344549, and US20180127780, each of which is incorporated herein by reference in their entirety.

[0847] In some embodiments, a portion or fragment of a nuclease (e.g., Cas9) is fused to an intein. The nuclease can be fused to the N-terminus or the C-terminus of the intein. In some embodiments, a portion or fragment of a fusion protein is fused to an intein and fused to an AAV capsid protein. The intein, nuclease and capsid protein can be fused together in any arrangement (e.g., nuclease-intein-capsid, intein-nuclease-capsid, capsid-intein-nuclease, etc.). In some embodiments, an N-terminal fragment of a base editor (e.g., ABE, CBE) is fused to a split intein-N and a C-terminal fragment is fused to a split intein-C. These fragments are then packaged into two or more AAV vectors. In some embodiments, the N-terminus of an intein is fused to the C-terminus of a fusion protein and the C-terminus of the intein is fused to the N-terminus of an AAV capsid protein.

[0848] In one embodiment, inteins are utilized to join fragments or portions of a cytidine or adenosine base editor protein that is grafted onto an AAV capsid protein. The use of certain inteins for joining heterologous protein fragments is described, for example, in Wood et al., J. Biol. Chem. 289(21); 14512-9 (2014). For example, when fused to separate protein fragments, the inteins IntN and IntC recognize each other, splice themselves out and simultaneously ligate the flanking N- and C-terminal exteins of the protein fragments to which they were fused, thereby reconstituting a full-length protein from the two protein fragments. Other suitable inteins will be apparent to a person of skill in the art.

[0849] In some embodiments, an ABE was split into N- and C-terminal fragments at Ala, Ser, Thr, or Cys residues within selected regions of SpCas9. These regions correspond to loop regions identified by Cas9 crystal structure analysis.

[0850] The N-terminus of each fragment is fused to an intein-N and the C-terminus of each fragment is fused to an intein C at amino acid positions S303, T310, T313, S355, A456, S460, A463, T466, S469, T472, T474, C574, S577, A589, and S590, which are indicated in capital letters in the sequence below (called the “Cas9 reference sequence”).

| (SEQ ID NO: 197) | |
|---|---|
| 1 | mdkkysigld igtnsvgwav itdeykvpsk kfkvlgntdr hsikknliga llfdsgetae |
| 61 | atrlkrtarr rytrrknric ylqeifsnem akvddsffhr leesflveed kkherhpifg |
| 121 | nivdevayhe kyptiyhlrk klvdstdkad lrliylalah mikfrghfli egdlnpdnsd |
| 181 | vdklfiqlvq tynqlfeenp inasgvdaka ilsarlsksr rlenliaqlp gekknglfgn |
| 241 | lialslgltp nfksnfdlae daklqlskdt ydddldnlla qigdqyadlf laaknlsdai |
| 301 | llSdilrvnT eiTkaplsas mikrydehhq dltllkalvr qqlpekykei ffdqSkngya |
| 361 | gyidggasqe efykfikpil ekmdgteell vklnredllr kqrtfdngsi phqihlgelh |
| 421 | ailrrqedfy pflkdnreki ekiltfripy yvgplArgnS rfAwmTrkSe eTiTpwnfee |
| 481 | vvdkgasaqs fiermtnfdk nlpnekvlpk hsllyeyftv yneltkvkyv tegmrkpafl |
| 541 | sgeqkkaivd llfktnrkvt vkqlkedyfk kieCfdSvei sgvedrfnAS lgtyhdllki |
| 601 | ikdkdfldne enedilediv ltltlfedre mieerlktya hlfddkvmkq lkrrrytgwg |
| 661 | rlsrklingi rdkqsgktil dflksdgfan rnfmqlihdd sltfkediqk aqvsgqgdsl |
| 721 | hehianlags paikkgilqt vkvvdelvkv mgrhkpeniv iemarenqtt qkgqknsrer |
| 781 | mkrieegike lgsqilkehp ventqlqnek lylyylqngr dmyvdqeldi nrlsdydvdh |
| 841 | ivpqsflkdd sidnkvltrs dknrgksdnv pseevvkkmk nywrqllnak litqrkfdnl |
| 901 | tkaergglse ldkagfikrq lvetrqitkh vaqildsrmn tkydendkli revkvitlks |
| 961 | klvsdfrkdf qfykvreinn yhhahdayln avvgtalikk ypklesefvy gdykvydvrk |
| 1021 | miakseqeig katakyffys nimnffktei tlangeirkr plietngetg eivwdkgrdf |
| 1081 | atvrkvlsmp qvnivkktev qtggfskesi lpkrnsdkli arkkdwdpkk yggfdsptva |
| 1141 | ysvlvvakve kgkskklksv kellgitime rssfeknpid fleakgykev kkdliiklpk |
| 1201 | yslfelengr krmlasagel qkgnelalps kyvnflylas hyeklkgspe dneqkqlfve |
| 1261 | qhkhyldeii eqisefskrv iladanldkv lsaynkhrdk pireqaenii hlftltnlga |
| 1321 | paafkyfdtt idrkrytstk evldatlihq sitglyetri dlsqlggd |

### Pharmaceutical Compositions

[0851] In some aspects, the present invention provides a pharmaceutical composition comprising any of the cells, polynucleotides, vectors, base editors, base editor systems, guide polynucleotides, fusion proteins, or the fusion protein-guide polynucleotide complexes described herein

[0852] The pharmaceutical compositions of the present invention can be prepared in accordance with known techniques. See, e.g., Remington, The Science And Practice of Pharmacy (21st ed. 2005). In general, the cell, or population thereof is admixed with a suitable carrier prior to administration or storage, and in some embodiments, the pharmaceutical composition further comprises a pharmaceutically acceptable carrier. Suitable pharmaceutically acceptable carriers generally comprise inert substances that aid in administering the pharmaceutical composition to a subject, aid in processing the pharmaceutical compositions into deliverable preparations, or aid in storing the pharmaceutical composition prior to administration. Pharmaceutically acceptable carriers can include agents that can stabilize, optimize or otherwise alter the form, consistency, viscosity, pH, pharmacokinetics, solubility of the formulation. Such agents include buffering agents, wetting agents, emulsifying agents, diluents, encapsulating agents, and skin penetration enhancers. For example, carriers can include, but are not limited to, saline, buffered saline, dextrose, arginine, sucrose, water, glycerol, ethanol, sorbitol, dextran, sodium carboxymethyl cellulose, and combinations thereof.

[0853] Some nonlimiting examples of materials which can serve as pharmaceutically-acceptable carriers include: (1) sugars, such as lactose, glucose and sucrose; (2) starches, such as corn starch and potato starch; (3) cellulose, and its derivatives, such as sodium carboxymethyl cellulose, methylcellulose, ethyl cellulose, microcrystalline cellulose and cellulose acetate; (4) powdered tragacanth; (5) malt; (6) gelatin; (7) lubricating agents, such as magnesium stearate, sodium lauryl sulfate and talc; (8) excipients, such as cocoa butter and suppository waxes; (9) oils, such as peanut oil, cottonseed oil, safflower oil, sesame oil, olive oil, corn oil and soybean oil; (10) glycols, such as propylene glycol; (11) polyols, such as glycerin, sorbitol, mannitol and polyethylene glycol (PEG); (12) esters, such as ethyl oleate and ethyl laurate; (13) agar; (14) buffering agents, such as magnesium hydroxide and aluminum hydroxide; (15) alginic acid; (16) pyrogen-free water; (17) isotonic saline; (18) Ringer's solution; (19) ethyl alcohol; (20) pH buffered solutions; (21) polyesters, polycarbonates and/or polyanhydrides; (22) bulking agents, such as polypeptides and amino acids (23) serum alcohols, such as ethanol; and (23) other non-toxic compatible substances employed in pharmaceutical formulations. Wetting agents, coloring agents, release agents, coating agents, sweetening agents, flavoring agents, perfuming agents, preservative and antioxidants can also be present in the formulation.

[0854] Pharmaceutical compositions can comprise one or more pH buffering compounds to maintain the pH of the formulation at a predetermined level that reflects physiological pH, such as in the range of about 5.0 to about 8.0. The pH buffering compound used in the aqueous liquid formulation can be an amino acid or mixture of amino acids, such as histidine or a mixture of amino acids such as histidine and glycine. Alternatively, the pH buffering compound is preferably an agent which maintains the pH of the formulation at a predetermined level, such as in the range of about 5.0 to about 8.0, and which does not chelate calcium ions. Illustrative examples of such pH buffering compounds include, but are not limited to, imidazole and acetate ions. The pH buffering compound may be present in any amount suitable to maintain the pH of the formulation at a predetermined level.

[0855] Pharmaceutical compositions can also contain one or more osmotic modulating agents, i.e., a compound that modulates the osmotic properties (e.g., tonicity, osmolality, and/or osmotic pressure) of the formulation to a level that is acceptable to the blood stream and blood cells of recipient individuals. The osmotic modulating agent can be an agent that does not chelate calcium ions. The osmotic modulating agent can be any compound known or available to those skilled in the art that modulates the osmotic properties of the formulation. One skilled in the art may empirically determine the suitability of a given osmotic modulating agent for use in the inventive formulation. Illustrative examples of suitable types of osmotic modulating agents include, but are not limited to: salts, such as sodium chloride and sodium acetate; sugars, such as sucrose, dextrose, and mannitol; amino acids, such as glycine; and mixtures of one or more of these agents and/or types of agents. The osmotic modulating agent(s) may be present in any concentration sufficient to modulate the osmotic properties of the formulation.

[0856] In addition to a modified cell, or population thereof, and a carrier, the pharmaceutical compositions of the present invention can include at least one additional therapeutic agent useful in the treatment of disease. For example, some embodiments of the pharmaceutical composition described herein further comprises a chemotherapeutic agent. In some embodiments, the pharmaceutical composition further comprises a cytokine peptide or a nucleic acid sequence encoding a cytokine peptide. In some embodiments, the pharmaceutical compositions comprising the cell or population thereof can be administered separately from an additional therapeutic agent.

[0857] Of course, for any composition to be administered to an animal or human, and for any particular method of administration, it is preferred to determine therefore: toxicity, such as by determining the lethal dose (LD) and LD50 in a suitable animal model (e.g., a rodent such as a mouse); and, the dosage of the composition(s), concentration of components therein, and the timing of administering the composition(s), which elicit a suitable response. Such determinations do not require undue experimentation from the knowledge of the skilled artisan, this disclosure and the documents cited herein. And, the time for sequential administrations can be ascertained without undue experimentation.

[0858] In some embodiments, the pharmaceutical composition is formulated for delivery to a subject. Suitable routes of administrating the pharmaceutical composition described herein include, without limitation: topical, subcutaneous, transdermal, intradermal, intralesional, intraarticular, intraperitoneal, intravesical, transmucosal, gingival, intradental, intracochlear, transtympanic, intraorgan, epidural, intrathecal, intramuscular, intravenous, intravascular, intraosseus, periocular, intratumoral, intracerebral, and intracerebroventricular administration.

[0859] In some embodiments, the pharmaceutical composition described herein is administered locally to a diseased site (e.g., a liver). In some embodiments, the pharmaceutical composition described herein is administered to a subject by injection, by means of a catheter, by means of a suppository, or by means of an implant, the implant being of a porous, non-porous, or gelatinous material, including a membrane, such as a sialastic membrane, or a fiber.

[0860] In other embodiments, the pharmaceutical composition described herein is delivered in a controlled release system. In one embodiment, a pump can be used (see, e.g., Langer, 1990, Science 249: 1527-1533; Sefton, 1989, CRC Crit. Ref. Biomed. Eng. 14:201; Buchwald et al., 1980, Surgery 88:507; Saudek et al., 1989, N. Engl. J. Med. 321:574). In another embodiment, polymeric materials can be used. (See, e.g., Medical Applications of Controlled Release (Langer and Wise eds., CRC Press, Boca Raton, Fla., 1974); Controlled Drug Bioavailability, Drug Product Design and Performance (Smolen and Ball eds., Wiley, New York, 1984); Ranger and Peppas, 1983, Macromol. Sci. Rev. Macromol. Chem. 23:61. See also Levy et al., 1985, Science 228: 190; During et al., 1989, Ann. Neurol. 25:351; Howard et al., 1989, J. Neurosurg. 71: 105.) Other controlled release systems are discussed, for example, in Langer, supra.

[0861] In some embodiments, the pharmaceutical composition is formulated in accordance with routine procedures as a composition adapted for intravenous or subcutaneous administration to a subject, e.g., a human. In some embodiments, pharmaceutical composition for administration by injection are solutions in sterile isotonic use as solubilizing agent and a local anesthetic such as lignocaine to ease pain at the site of the injection. Generally, the ingredients are supplied either separately or mixed together in unit dosage form, for example, as a dry lyophilized powder or water free concentrate in a hermetically sealed container such as an ampoule or sachette indicating the quantity of active agent. Where the pharmaceutical is to be administered by infusion, it can be dispensed with an infusion bottle containing sterile pharmaceutical grade water or saline. Where the pharmaceutical composition is administered by injection, an ampoule of sterile water for injection or saline can be provided so that the ingredients can be mixed prior to administration.

[0862] A pharmaceutical composition for systemic administration can be a liquid, e.g., sterile saline, lactated Ringer's or Hank's solution. In addition, the pharmaceutical composition can be in solid forms and re-dissolved or suspended immediately prior to use. Lyophilized forms are also contemplated. The pharmaceutical composition can be contained within a lipid particle or vesicle, such as a liposome or microcrystal, which is also suitable for parenteral administration. The particles can be of any suitable structure, such as unilamellar or plurilamellar, so long as compositions are contained therein. Compounds can be entrapped in “stabilized plasmid-lipid particles” (SPLP) containing the fusogenic lipid dioleoylphosphatidylethanolamine (DOPE), low levels (5-10 mol %) of cationic lipid, and stabilized by a polyethyleneglycol (PEG) coating (Zhang Y. P. et al., Gene Ther. 1999, 6: 1438-47). Positively charged lipids such as N-[1-(2,3-dioleoyloxi)propyl]-N,N,N-trimethyl-amoniummethylsulfate, or “DOTAP,” are particularly preferred for such particles and vesicles. The preparation of such lipid particles is well known. See, e.g., U.S. Pat. Nos. 4,880,635; 4,906,477; 4,911,928; 4,917,951; 4,920,016; and 4,921,757; each of which is incorporated herein by reference.

[0863] The pharmaceutical composition described herein can be administered or packaged as a unit dose, for example. The term “unit dose” when used in reference to a pharmaceutical composition of the present disclosure refers to physically discrete units suitable as unitary dosage for the subject, each unit containing a predetermined quantity of active material calculated to produce the desired therapeutic effect in association with the required diluent; i.e., carrier, or vehicle.

[0864] Further, the pharmaceutical composition can be provided as a pharmaceutical kit comprising (a) a container containing a compound of the invention in lyophilized form and (b) a second container containing a pharmaceutically acceptable diluent (e.g., sterile used for reconstitution or dilution of the lyophilized compound of the invention. Optionally associated with such container(s) can be a notice in the form prescribed by a governmental agency regulating the manufacture, use or sale of pharmaceuticals or biological products, which notice reflects approval by the agency of manufacture, use or sale for human administration.

[0865] In another aspect, an article of manufacture containing materials useful for the treatment of the diseases described above is included. In some embodiments, the article of manufacture comprises a container and a label. Suitable containers include, for example, bottles, vials, syringes, and test tubes. The containers can be formed from a variety of materials such as glass or plastic. In some embodiments, the container holds a composition that is effective for treating a disease described herein and can have a sterile access port. For example, the container can be an intravenous solution bag or a vial having a stopper pierceable by a hypodermic injection needle. The active agent in the composition is a compound of the invention. In some embodiments, the label on or associated with the container indicates that the composition is used for treating the disease of choice. The article of manufacture can further comprise a second container comprising a pharmaceutically-acceptable buffer, such as phosphate-buffered saline, Ringer's solution, or dextrose solution. It can further include other materials desirable from a commercial and user standpoint, including other buffers, diluents, filters, needles, syringes, and package inserts with instructions for use.

[0866] In some embodiments, any of the fusion proteins, gRNAs, and/or complexes described herein are provided as part of a pharmaceutical composition. In some embodiments, the pharmaceutical composition comprises any of the fusion proteins provided herein. In some embodiments, the pharmaceutical composition comprises any of the complexes provided herein. In some embodiments, the pharmaceutical composition comprises a ribonucleoprotein complex comprising an RNA-guided nuclease (e.g., Cas9) that forms a complex with a gRNA and a cationic lipid. In some embodiments pharmaceutical composition comprises a gRNA, a nucleic acid programmable DNA binding protein, a cationic lipid, and a pharmaceutically acceptable excipient. Pharmaceutical compositions can optionally comprise one or more additional therapeutically active substances.

[0867] In some embodiments, compositions provided herein are administered to a subject, for example, to a human subject, in order to effect a targeted genomic modification within the subject. In some embodiments, cells are obtained from the subject and contacted with any of the pharmaceutical compositions provided herein. In some embodiments, cells removed from a subject and contacted ex vivo with a pharmaceutical composition are re-introduced into the subject, optionally after the desired genomic modification has been effected or detected in the cells. Methods of delivering pharmaceutical compositions comprising nucleases are known, and are described, for example, in U.S. Pat. Nos. 6,453,242; 6,503,717; 6,534,261; 6,599,692; 6,607,882; 6,689,558; 6,824,978; 6,933,113; 6,979,539; 7,013,219; and 7,163,824, the disclosures of all of which are incorporated by reference herein in their entireties. Although the descriptions of pharmaceutical compositions provided herein are principally directed to pharmaceutical compositions which are suitable for administration to humans, it will be understood by the skilled artisan that such compositions are generally suitable for administration to animals or organisms of all sorts, for example, for veterinary use.

[0868] Modification of pharmaceutical compositions suitable for administration to humans in order to render the compositions suitable for administration to various animals is well understood, and the ordinarily skilled veterinary pharmacologist can design and/or perform such modification with merely ordinary, if any, experimentation. Subjects to which administration of the pharmaceutical compositions is contemplated include, but are not limited to, humans and/or other primates; mammals, domesticated animals, pets, and commercially relevant mammals such as cattle, pigs, horses, sheep, cats, dogs, mice, and/or rats; and/or birds, including commercially relevant birds such as chickens, ducks, geese, and/or turkeys.

[0869] Formulations of the pharmaceutical compositions described herein can be prepared by any method known or hereafter developed in the art of pharmacology. In general, such preparatory methods include the step of bringing the active ingredient(s) into association with an excipient and/or one or more other accessory ingredients, and then, if necessary and/or desirable, shaping and/or packaging the product into a desired single- or multi-dose unit. Pharmaceutical formulations can additionally comprise a pharmaceutically acceptable excipient, which, as used herein, includes any and all solvents, dispersion media, diluents, or other liquid vehicles, dispersion or suspension aids, surface active agents, isotonic agents, thickening or emulsifying agents, preservatives, solid binders, lubricants and the like, as suited to the particular dosage form desired. Remington's The Science and Practice of Pharmacy, 21st Edition, A. R. Gennaro (Lippincott, Williams & Wilkins, Baltimore, MD, 2006; incorporated in its entirety herein by reference) discloses various excipients used in formulating pharmaceutical compositions and known techniques for the preparation thereof. See also PCT application PCT/US2010/055131 (Publication number WO2011/053982 A8, filed Nov. 2, 2010), incorporated in its entirety herein by reference, for additional suitable methods, reagents, excipients and solvents for producing pharmaceutical compositions comprising a nuclease.

[0870] Except insofar as any conventional excipient medium is incompatible with a substance or its derivatives, such as by producing any undesirable biological effect or otherwise interacting in a deleterious manner with any other component(s) of the pharmaceutical composition, its use is contemplated to be within the scope of this disclosure.

[0871] The compositions, as described above, can be administered in effective amounts. The effective amount will depend upon the mode of administration, the particular condition being treated, and the desired outcome. It may also depend upon the stage of the condition, the age and physical condition of the subject, the nature of concurrent therapy, if any, and like factors well-known to the medical practitioner. For therapeutic applications, it is that amount sufficient to achieve a medically desirable result.

[0872] In some embodiments, compositions in accordance with the present disclosure can be used for treatment of any of a variety of diseases, disorders, and/or conditions.

### Methods of Treatment

[0873] Some aspects of the present invention provide methods of treating a subject having or at risk of developing angioedema, the method comprising administering to a subject in need an effective therapeutic amount of a pharmaceutical composition as described herein. In embodiments, the methods involve introducing one or more alterations into a KLKB1 polynucleotide in a cell. In an embodiment, the cell is a hematopoietic cell. In some instances, the cell is in a subject and, optionally, in the liver of a subject. More specifically, the methods of treatment include administering to a subject in need thereof one or more pharmaceutical compositions described herein, optionally comprising one or more cells having at least one edited gene. In other embodiments, the methods of the invention comprise expressing or introducing into a cell a base editor polypeptide and one or more guide RNAs capable of targeting a nucleic acid molecule encoding at least one polypeptide. In various embodiments, the methods of the invention are associated with a reduction in a symptom of angioedema.

[0874] One of ordinary skill in the art would recognize that multiple administrations of the pharmaceutical compositions contemplated in particular embodiments may be required to affect the desired therapy. For example, a composition may be administered to the subject 1, 2, 3, 4, 5, 6, 7, 8, 9, or 10 or more times over a span of 1 week, 2 weeks, 3 weeks, 1 month, 2 months, 3 months, 4 months, 5 months, 6 months, 1 year, 2 years, 5, years, 10 years, or more. In any of such methods, the methods may comprise administering to the subject an effective amount of an edited cell or a base editor system or polynucleotide encoding such system. In any of such methods, the methods may comprise administering one or more doses of an effective amount of the edited cells per day. In any of such methods, the methods may comprise administering two or more doses of an effective amount of the mod edited ified cells per day. In any of such methods, the methods may comprise administering three or more doses of an effective amount of the edited cells per day. In any of such methods, the methods may comprise administering one or more doses of an effective amount of the edited cells per week. In any of such methods, the methods may comprise administering two or more doses of an effective amount of the edited cells per week. In any of such methods, the methods may comprise administering three or more doses of an effective amount of the edited cells per week. In any of such methods, the methods may comprise administering one or more doses of an effective amount of the edited cells per month. In any of such methods, the methods may comprise administering two or more doses of an effective amount of the edited cells per month. In any of such methods, the methods may comprise administering three or more doses of an effective amount of the edited cells per month.

[0875] Administration of the pharmaceutical compositions contemplated herein may be carried out using conventional techniques including, but not limited to, infusion, transfusion, or parenterally. In some embodiments, parenteral administration includes infusing or injecting intravascularly, intravenously, intramuscularly, intraarterially, intrathecally, intratumorally, intradermally, intraperitoneally, transtracheally, subcutaneously, subcuticularly, intraarticularly, subcapsularly, subarachnoidly and intrasternally.

[0876] In some embodiments, a composition described herein (e.g., base editor system) is administered in a dosage that is about 0.5-30 mg per kilogram body weight of the human subject. In another embodiment, the amount of the composition administered is about 0.5-20 mg per kilogram body weight of the human subject. In another embodiment, the amount of the composition administered is about 0.5-10 mg per kilogram body weight of the human subject. In another embodiment, the amount of the composition administered is about 0.04 mg, about 0.08 mg, about 0.16 mg, about 0.32 mg, about 0.64 mg, about 1.25 mg, about 1.28 mg, about 1.92 mg, about 2.5 mg, about 3.56 mg, about 3.75 mg, about 5.0 mg, about 7.12 mg, about 7.5 mg, about 10 mg, about 14.24 mg, about 15 mg, about 20 mg, or about 30 mg per kilogram body weight of the human subject. In another embodiment, the amount of the compo composition und administered is about 1.92 mg, about 3.75 mg, about 7.5 mg, about 15.0 mg, or about 30.0 mg per kilogram body weight of the human subject and the composition is administered two times a week. In another embodiment, the amount of the composition administered is about 1.28 mg, about 2.56 mg, about 5.0 mg, about 10 mg, or about 20 mg per kilogram body weight of the human subject and the composition is administered two times a week. In another embodiment, the amount of the composition administered is about 1.92 mg, about 3.75 mg, about 7.5 mg, about 15.0 mg, or about 30.0 mg per kilogram body weight of the human subject and the composition is administered once a week. In another embodiment, the amount of the composition administered is about 1.28 mg, about 2.56 mg, about 5.0 mg, about 10 mg, or about 20 mg per kilogram body weight of the human subject and the composition is administered once a week. In another embodiment, the amount of the composition administered is about 1.92 mg, about 3.75 mg, about 7.5 mg, about 15.0 mg, or about 30.0 mg per kilogram body weight of the human subject and the composition is administered once a day three, five or seven times in a seven day period. In another embodiment, the composition is administered intravenously once a day, seven times in a seven day period. In another embodiment, the amount of the composition administered is about 1.28 mg, about 2.56 mg, about 5.0 mg, about 10 mg, or about 20 mg per kilogram body weight of the human subject and the composition is administered once a day three, five or seven times in a seven day period. In another embodiment, the composition is administered intravenously once a day, seven times in a seven day period.

[0877] In some embodiments, the composition is administered over a period of 0.25 hour (h), 0.5 h, 1 h, 2 h, 3 h, 4 h, 5 h, 6 h, 7 h, 8 h, 9 h, 10 h, 11 h, or 12 h. In another embodiment, the composition is administered over a period of 0.25-2 h. In another embodiment, the composition is gradually administered over a period of 1 h. In another embodiment, the composition is gradually administered over a period of 2 h.

[0878] In embodiments, the methods provided herein are associated with the reduction of a symptom of hereditary angioedema a subject. In embodiments, the methods are associated with improved health in a subject relative to a reference (e.g., an untreated subject).

### Kits

[0879] The invention provides kits for the treatment of hereditary angioedema in a subject. In some embodiments, the kit further includes a base editor system or a polynucleotide encoding a base editor system, wherein the base editor polypeptide system a nucleic acid programmable DNA binding protein (napDNAbp), a deaminase, and a guide RNA. In some embodiments, the napDNAbp is Cas9 or Cas12. In some embodiments, the polynucleotide encoding the base editor is a mRNA sequence. In some embodiments, the deaminase is a cytidine deaminase or an adenosine deaminase. In some embodiments, the kit comprises an edited cell and instructions regarding the use of such cell.

[0880] The kits may further comprise written instructions for using a base editor, base editor system and/or edited cell as described herein. In other embodiments, the instructions include at least one of the following: precautions; warnings; clinical studies; and/or references. The instructions may be printed directly on the container (when present), or as a label applied to the container, or as a separate sheet, pamphlet, card, or folder supplied in or with the container. In a further embodiment, a kit can comprise instructions in the form of a label or separate insert (package insert) for suitable operational parameters. In yet another embodiment, the kit can comprise one or more containers with appropriate positive and negative controls or control samples, to be used as standard(s) for detection, calibration, or normalization. The kit can further comprise a second container comprising a pharmaceutically-acceptable buffer, such as (sterile) phosphate-buffered saline, Ringer's solution, or dextrose solution. It can further include other materials desirable from a commercial and user standpoint, including other buffers, diluents, filters, needles, syringes, and package inserts with instructions for use.

[0881] The practice of the present invention employs, unless otherwise indicated, conventional techniques of molecular biology (including recombinant techniques), microbiology, cell biology, biochemistry and immunology, which are well within the purview of the skilled artisan. Such techniques are explained fully in the literature, such as, “Molecular Cloning: A Laboratory Manual”, second edition (Sambrook, 1989); “Oligonucleotide Synthesis” (Gait, 1984); “Animal Cell Culture” (Freshney, 1987); “Methods in Enzymology” “Handbook of Experimental Immunology” (Weir, 1996); “Gene Transfer Vectors for Mammalian Cells” (Miller and Calos, 1987); “Current Protocols in Molecular Biology” (Ausubel, 1987); “PCR: The Polymerase Chain Reaction”, (Mullis, 1994); “Current Protocols in Immunology” (Coligan, 1991). These techniques are applicable to the production of the polynucleotides and polypeptides of the invention, and, as such, may be considered in making and practicing the invention. Particularly useful techniques for particular embodiments will be discussed in the sections that follow. The following examples are put forth so as to provide those of ordinary skill in the art with a complete disclosure and description of how to make and use the assay, screening, and therapeutic methods of the invention, and are not intended to limit the scope of what the inventors regard as their invention.

### EXAMPLES

### Example 1. Using an Adenosine Base Editor (ABE) to Disrupt Splicing of KLKB1 mRNA or Introduce a Missense Mutation to an KLKB1 Polynucleotide

[0882] In this example, an adenosine base editor (ABE) is used to introduce a precise mutation in the highly conserved splice acceptor “AG” nucleic acid sequence at the 5′ end of an exon of the KLKB1 polynucleotide sequence or to introduce a missense mutation to an exon of the KLKB1 polynucleotide sequence. The A-to-G base change in the “AG” nucleic acid sequence of the canonical splice acceptor site is associated with messenger RNA (mRNA) missplicing and transcription disruption and/or alternative splicing of an exon of the KLKB1 polynucleotide sequence. The missense mutation is associated with a reduction in activity of the KLKB1 polypeptide.

[0883] ABEs are used to disrupt the canonical “AG” splice acceptor by efficiently targeting the “A” nucleobase in the AG splice acceptor in the KLKB1 polynucleotide sequence and converting A>G at the targeted site. The ABEs are also used to introduce a missense mutation to the KLKB1 polynucleotide sequence. Base editing is tested in the HEK293T cell line and/or using target dsDNA. Guide RNAs (gRNA) containing the spacers listed in Table 1A or Table 1B, or fragments thereof, are used in conjunction with the ABEs indicated in Table 1A or Table 1B.

[0884] The gRNAs encompass the scaffold sequence and the spacer sequences as provided herein, or as determined based on the knowledge of the skilled practitioner and as would be understood to the skilled practitioner in the art as suitable for use in disruption of splicing or introduction of a missense mutation. (See, e.g., Komor, A. C., et al., “Programmable editing of a target base in genomic DNA without double-stranded DNA cleavage” Nature 533, 420-424 (2016); Gaudelli, N. M., et al., “Programmable base editing of A•T to G•C in genomic DNA without DNA cleavage” Nature 551, 464-471 (2017); Komor, A. C., et al., “Improved base excision repair inhibition and bacteriophage Mu Gam protein yields C:G-to-T:A base editors with higher efficiency and product purity” Science Advances 3:eaao4774 (2017), and Rees, H. A., et al., “Base editing: precision chemistry on the genome and transcriptome of living cells.” Nat Rev Genet. 2018 December; 19(12):770-788. doi: 10.1038/s41576-018-0059-1).

[0885] The targeted adenosine (A) nucleobase is converted to guanosine (G) in the intronic splice acceptor site sequence 5′ of the exon or in an exon of the KLKB1 polynucleotide to introduce a missense mutation.

### Example 2. Using a Cytidine Base Editor (CBE) to Disrupt Splicing of KLKB1 mRNA and/or to Introduce a Stop Codon to an Exon of the KLKB1 Polynucleotide Sequence

[0886] In this example, a cytidine base editor (CBE) is used to introduce a precise mutation in to introduce a precise C-to-T mutation near the splice acceptor nucleic acid sequence at the 5′ end of an exon of the KLKB1 polynucleotide sequence, to introduce a missense mutation to an exon of the KLKB1 polynucleotide sequence, and/or to introduce a stop codon to the KLKB1 polynucleotide. The C-to-T base change in the splice acceptor nucleic acid sequence is associated with messenger RNA (mRNA) missplicing and transcription disruption and/or alternative splicing of an exon of the KLKB1 polynucleotide sequence. The missense mutation and/or stop codon is associated with a reduction in activity and/or translation of the KLKB1 polypeptide.

[0887] CBEs are used to disrupt the canonical splice acceptor by efficiently targeting a “C” nucleobase in the splice acceptor in the KLKB1 polynucleotide sequence and converting C>T at the targeted site. The CBEs are also used to introduce a missense mutation and/or stop codon to the KLKB1 polynucleotide sequence. Base editing is tested in the HEK293T cell line and/or using target dsDNA. Guide RNAs (gRNA) containing the spacers listed in Table 1A or Table 1B, or fragments thereof, are used in conjunction with the CBEs indicated in Table 1A or Table 1B.

[0888] The gRNAs encompass the scaffold sequence and the spacer sequences as provided herein, or as determined based on the knowledge of the skilled practitioner and as would be understood to the skilled practitioner in the art as suitable for use in disruption of splicing, introduction of a missense mutation, and/or introducing a stop codon.

[0889] The targeted adenosine (C) nucleobase is converted to guanosine (T) in the intronic splice acceptor site sequence 5′ of the exon or in an exon of the KLKB1 polynucleotide to introduce a missense mutation or stop codon.

### Example 3. Using a Nuclease to Alter a KLKB1 Polynucleotide Sequence

[0890] In this example, a nuclease is used to disrupt expression of a KLKB1 polynucleotide. The nuclease introduces a double-stranded break within an exon of the KLKB1 polynucleotide, which leads to the introduction of an indel mutation in the KLKB1 polynucleotide. The double-stranded break is associated with reduced expression of the KLKB1 polynucleotide and/or reduced activity of the KLKB1 polypeptide.

[0891] Efficacy of the nuclease in altering the KLKB1 polynucleotide sequence (e.g., through introduction of a double-stranded break and/or introduction of an indel alteration) is tested in the HEK293T cell line and/or using target dsDNA. Guide RNAs (gRNA) containing the spacers listed in Table 1A are used in conjunction with an endonuclease (e.g., Cas9).

[0892] The nucleases are associated with cutting of the KLKB1 polynucleotide sequence and/or introduction of an indel alteration to the KLKB1 polynucleotide sequence.

### Example 4. Kallikrein B1 (KLKB1) Guide Screening and Functional Knockdown Assessment in Primary Hepatocytes

[0893] Experiments were undertaken to functionally assess the ability of base editor systems containing guide polynucleotides containing sequences listed in Tables 1A and 1B to mediate the knock-down of KLKB1 polypeptide expression in primary human hepatocytes.

[0894] Guide polynucleotides designed to knockdown KLKB1 protein expression were screened in HEK293 T cells. The base editor systems listed in Table 20 below were used to base edit the HEK293 T cells. To base edit the HEK293 T cells, the cells were transduced with the base editing systems indicated in Table 20 by introducing into the cells the guide polynucleotide and an mRNA molecule encoding the base editor. Sequences for the guide polynucleotides listed in Table 20 are provided in Table 1B. Many of the base editor systems had target base editing efficiencies in the HEK293 T cells that were greater than 40%. Some guide polynucleotides were used in two or more base editor systems that had base editing efficiencies that were greater than 40%.

TABLE 20
Total percent target base editing achieved in HEK293 T cells contacted with base
editor systems containing the indicated guide-editor combinations. The inlaid base editors
(IBEs) listed in the table correspond to those listed in Table 4.

| | | Percent Target |
|---|---|---|
| | | Base Editing |
| Guide | Editor | (%) |
| gRNA1158 | ABE8.8-VRQR | 93.70 |
| gRNA1151 | ABE8.8 | 85.78 |
| gRNA1166 | IBE6-VRQR | 85.21 |
| gRNA1159 | ABE8.8 | 84.68 |
| gRNA1151 | IBE6 | 84.04 |
| sgRNA_023 | ABE8.8 | 82.71 |
| gRNA1074 | ABE8.8- | 82.26 |
| | MQKFRAER | |
| gRNA1159 | IBE3 | 80.59 |
| gRNA1150 | ABE8.8- | 78.11 |
| | MQKFRAER | |
| gRNA1178 | IBE3 | 77.30 |
| gRNA1151 | IBE3 | 76.92 |
| gRNA1166 | IBE6- | 76.57 |
| | MQKFRAER | |
| gRNA1158 | IBE6- | 75.39 |
| | MQKFRAER | |
| gRNA1150 | IBE3- | 74.76 |
| | MQKFRAER | |
| gRNA1159 | IBE6 | 74.02 |
| gRNA1108 | ABE8.8- | 73.14 |
| | MQKFRAER | |
| gRNA1074 | IBE3- | 70.12 |
| | MQKFRAER | |
| gRNA1150 | IBE3-VRQR | 63.74 |
| gRNA1158 | IBE6-VRQR | 60.46 |
| gRNA1108 | BBE3- | 56.12 |
| | MQKFRAER | |
| gRNA1115 | ABE8.8- | 53.54 |
| | MQKFRAER | |
| gRNA1090 | IBE6-VRQR | 52.05 |
| gRNA1178 | IBE6 | 47.24 |
| gRNA1104 | IBE3- | 47.07 |
| | MQKFRAER | |
| gRNA1090 | IBE6- | 46.00 |
| | MQKFRAER | |
| gRNA1074 | IBE3-VRQR | 41.84 |
| gRNA1166 | ABE8.8-VRQR | 23.66 |
| gRNA1157 | ABE8.8- | 15.42 |
| | MQKFRAER | |
| gRNA1178 | ABE8.8 | 14.66 |
| gRNA1108 | IBE3-VRQR | 13.79 |
| gRNA1109 | IBE6-VRQR | 4.03 |
| gRNA1157 | IBE3- | 3.05 |
| | MQKFRAER | |
| gRNA1109 | IBE6- | 2.70 |
| | MQKFRAER | |
| gRNA1138 | ABE8.8-VRQR | 2.05 |
| gRNA1157 | IBE3-VRQR | 1.22 |
| gRNA1138 | IBE6-VRQR | 0.25 |
| gRNA1138 | IBE6- | 0.06 |
| | MQKFRAER | |
| gRNA1104 | IBE3-VRQR | 0.02 |

[0895] Thirteen (13) base editor systems, namely, ABE7.10-MQKFRAER_gRNA1074, IBE16_gRNA1090, IBE12-MQKFRAER_gRNA1104, ABE7.10-MQKFRAER_gRNA1108, ABE7.10-MQKFRAER_gRNA1115, ABE7.10-MQKFRAER_gRNA1150, ABE8.8_gRNA1151, IBE16_gRNA1151, ABE8.8-VRQR_gRNA1158, ABE8.8_gRNA1159, IBE12_gRNA1159, IBE16-VRQR_gRNA1166, and IBE12_gRNA1178, exhibited promising editing efficiency in HEK293T cells. These base editor systems that performed well in the HEK293T cells (bold in Table 20) were then used to base edit primary human hepatocytes (PHH) isolated from a PXB-mouse liver (chimeric mouse with human hepatocytes) (i.e., PXB-cells™). All base editor systems used in the PXB-cells used an ABE base editor for splice site disruption. These thirteen base editor systems were then screened in primary human hepatocytes to assess editing efficiency in primary cells and their capacity to mediate functional knockdown of KLKB1 protein expression.

[0896] To screen the thirteen base editor systems in primary human hepatocytes, the primary human hepatocytes were transduced with mRNA encoding a base editor along with a guide polynucleotide. Cells were transfected in triplicate following a 3-day cell incubation. In addition to the 13 guide-editor pairs of interest, two positive control systems were used. These included the base editor system ABE8.8+sgRNA_088, which was known to yield high editing efficiency at sites outside of the KLKB1 gene, and the nuclease system containing Cas9+gRNA2666, which was known to induce functional KLKB1 knockdown in hepatocytes (G013901; WO2021158858A1, the disclosure of which is incorporated herein by references for all purposes). An untreated condition was also included as a negative control.

[0897] To assess functional KLKB1 knockdown, cell supernatants were collected from cultures of base edited cells and stored at −80° C. Collections were performed prior to transfection (3-day incubation), as well as 4-, 7-, 10-, and 13-days post-transfection. Genomic DNA was harvested from cells 13 days post-transfection and editing efficiency was assessed by Next Generation Sequencing (NGS). A human Prekallikrein/Kallikrein enzyme-linked immunosorbent assay (ELISA) assay was used to assess KLKB1 protein concentration in cell supernatants pre-transfection, as well as 7-days and 13-days post-transfection.

[0898] Pre-transfection, no significant difference in KLKB1 concentration was observed between samples (FIG. 1). By 7-days post-transfection, a roughly 50% reduction in KLKB1 levels were observed for cells base edited using the base editor systems ABE8.8_gRNA1151, ABE8.8-VRQR_gRNA1158, ABE7.10-MQKFRAER_gRNA1074, ABE7.10-MQKFRAER_gRNA1150, and ABE8.8_gRNA1159 as compared to ABE8.8_sgRNA_088, which does not edit within the KLKB1 gene (FIG. 2). This reduction was comparable to the positive control Cas9_gRNA2666 (FIG. 2). Similar trends were observed 13-days post-transfection (FIG. 3). Editing efficiencies for ABE8.8_gRNA1151, ABE8.8-VRQR_gRNA1158, ABE7.10-MQKFRAER_gRNA1074, ABE7.10-MQKFRAER_gRNA1150, and ABE8.8_gRNA1159 were all approximately 60% (FIGS. 2 and 3). This was comparable to the positive controls ABE8.8_sgRNA_088 and Cas9_gRNA2666 (FIGS. 2 and 3). KLKB1 protein knockdown was positively correlated with editing rates across samples (FIGS. 2 and 3).

[0899] Several base editor systems evaluated had ˜60% on-target base editing efficiencies and knocked-down huKLKB1 expression by between about 40 and 50% relative to untreated cells. Some of the base editor systems evaluated had ˜50% on-target base editing efficiencies and knocked-down huKLKB1 expression by between about 30 and 40% relative to untreated cells. Other base editor systems evaluated had between 20 and 40% on-target base editing efficiencies and knocked down huKLKB1 expression by about 30% relative to untreated cells. Therefore, base editor systems were identified that were suitable for use in introducing base edits to primary human hepatocytes that resulted in knock-down of human KLKB1 polypeptide (huKLKB1) expression.

[0900] The following methods were employed in the above examples.

### PXB-Cell Maintenance

[0901] Two 24-well plates of PXB-cell hepatocytes were obtained from PhoenixBio. After receipt of cells, media was changed twice with pre-warmed dHCGM media (PhoenixBio)+10% Fetal Bovine Serum (Thermo Fisher, A3160401). Cells were then incubated according to the manufacturer's instructions. A media change was performed 2 days after receipt of cells and every 3 days thereafter. An extra media change was performed the day following transfection, after which a 3-day media change schedule was resumed. For all media changes other than the two initial changes, the change 2 days after receipt of cells, and the change one day following transfection (0 days pre-transfection and 4, 7, 10, and 13 days post-transfection), media was collected, distributed across multiple 96-well plates, and stored at −80° C.

### Cell Transfection

[0902] PXB-cells were transfected 5 days following their receipt. Just prior to transfection, a media change was performed for all wells (3-day incubation). Spent media was aliquoted across multiple 96 well plates and stored at −80° C. For each condition, 200 ng sgRNA (Agilent) and 600 ng editor mRNA (produced at Beam) were diluted to 25 μl with OPTIMEM (Thermo Fisher, 31985062) in a 96-well plate. Separately, lipofectamine MessengerMAX Reagent (Thermo Fisher, LMRNA015) at 1.5X the total volume of RNA was diluted in OPTIMEM to 25 μl for each condition, mixed thoroughly, and incubated at room temperature for 10 minutes. MessengerMAX solutions were then combined with the corresponding sgRNA+editor solution and thoroughly mixed. Following a 5-minute incubation at room temperature, the lipid encapsulated mRNA+sgRNA mixes were added dropwise onto the PXB-cells. Media was changed and spent media was discarded <16 hours following transfection.

Next Generation DNA sequencing (NGS)

[0903] Following media collection, genomic DNA was isolated from each PXB-cell well 13-days post-transfection according to the following protocol. 200 μl of QuickExtract DNA Extraction Solution (Lucigen, QE09050) was added to each well. Cells were incubated for 5 minutes at 37° C., after which the cells were manually dislodged from the bottom of each well by pipetting. The cells were incubated again for 5 minutes at 37° C., after which the buffer-cell mixture was thoroughly mixed, and 150 μl was transferred to a 96-well plate. The 96-well plate was incubated at 65° C. for 15 mins and then at 98° C. for 10 mins.

[0904] PCR was performed using Phusion U Green Multiplex PCR Master Mix (Fisher Scientific, F564L) and region-specific primers. A second round of PCR was then performed on the first round PCR products to add barcoded Illumina adaptor sequences to each sample. Second round PCR products were purified using SPRIselect beads (Thermo Fisher Scientific, B23317) at a 1:1 bead to PCR ratio. The combined library concentration was quantified using a Qubit 1X dsDNA HS Assay Kit (Thermo Fisher Scientific, Q33231), and the library was sequenced using a Miseq Reagent Kit v2 (300-cycles) (Illumina, MS-102-2002). Reads were aligned to appropriate reference sequences and editing efficiency was assessed at the appropriate sites.

### KLKB1 Protein Quantification

[0905] A human Prekallikrein/Kallikrein ELISA kit (Abcam, ab171015) was used to measure KLKB1 protein levels in PXB-cell supernatants at various timepoints pre- and post-transfection. PXB-cell supernatants were thawed at room temperature and diluted 1:10 in provided Diluent N buffer prior to loading on the ELISA plate. The ELISA assay was then performed according to manufacturer's instructions. Samples were allowed to develop for 15 minutes in Development solution prior to addition of Stop solution. Absorbance was read at 450 nm using an Infinite M Plex plate reader (Tecan).

### Codon-Optimization

[0906] The polynucleotide sequences encoding components of the base editor systems are codon-optimized. It has been established that Cas9 codon usage and nuclear localization sequence can dramatically alter genome editing efficiencies in eukaryotes (see e.g., Kim, S. et al., Rescue of high-specificity Cas9 variants using sgRNAs with matched 5′ nucleotides. Genome Biol 18, 218, doi:10.1186/s13059-017-1355-3 (2017); Mikami, M. et al., Comparison of CRISPR/Cas9 expression constructs for efficient targeted mutagenesis in rice. Plant Mol Biol 88, 561-572, doi:10.1007/s11103-015-0342-x (2015); Jinek, M. et al., RNA-programmed genome editing in human cells. Elife 2, e00471, doi:10.7554/eLife.00471 (2013)). The original Cas9n component of base editors contains six potential polyadenylation sites, leading to poor expression in eukaryotes (see e.g., Kim, S. et al., Rescue of high-specificity Cas9 variants using sgRNAs with matched 5′ nucleotides. Genome Biol 18, 218, doi:10.1186/s13059-017-1355-3 (2017); Komor, A. C. et al., Programmable editing of a target base in genomic DNA without double-stranded DNA cleavage. Nature 533, 420-424, doi:10.1038/nature17946 (2016); Gaudelli, N. M. et al. Programmable base editing of A*T to G*C in genomic DNA without DNA cleavage. Nature 551, 464-471, doi:10.1038/nature24644 (2017)). Replacing this with an extensively optimized codon sequence improves base editing efficiencies (see e.g., Cong, L. et al. Multiplex genome engineering using CRISPR/Cas systems. Science 339, 819-823, doi:10.1126/science.1231143 (2013); Koblan, L. W. et al. Improving cytidine and adenine base editors by expression optimization and ancestral reconstruction. Nat Biotechnol, doi:10.1038/nbt.4172 (2018); Zafra, M. P. et al. Optimized base editors enable efficient editing in cells, organoids and mice. Nat Biotechnol, doi:10.1038/nbt.4194 (2018)).

### Cloning

[0907] All cloning is conducted via USER enzyme (New England Biolabs) cloning methods (see Geu-Flores et al., USER fusion: a rapid and efficient method for simultaneous fusion and cloning of multiple PCR products. Nucleic Acids Res 35, e55, doi:10.1093/nar/gkm106 (2007)) and templates for PCR amplification are purchased as bacterial or mammalian codon optimized gene fragments (GeneArt). Vectors are transformed into Mach T1R Competent Cells (Thermo Fisher Scientific) and maintained at −80 C for long-term storage. All primers used in this work are purchased from Integrated DNA Technologies and PCRS are carried out using either Phusion U DNA Polymerase Green MultiPlex PCR Master Mix (ThermoFisher) or Q5 Hot Start High-Fidelity 2× Master Mix (New England Biolabs). All plasmids used in this work are freshly prepared from 50 mL of Machi culture using ZymoPURE Plasmid Midiprep (Zymo Research Corporation) which involves an endotoxin removal procedure. Molecular biology grade, Hyclone water (GE Healthcare Life Sciences) is used in all assays, transfections, and PCR reactions to ensure exclusion of DNAse activity.

### Mammalian Cell Culture Conditions

[0908] The HEK293T (293T) cell line is obtained from the American Tissue Culture Collection (ATCC). Cells are cultured at 37° C. with 5% C02. HEK293T cells [CLBTx013, American Type Cell Culture Collection (ATCC)] are cultured in Dulbecco's modified Eagles medium plus Glutamax (10566-016, Thermo Fisher Scientific) with 10% (v/v) fetal bovine serum (A31606-02, Thermo Fisher Scientific). Cells are tested negative for mycoplasma after receipt from supplier.

Hek293T Transfection and Genomic DNA (gDNA) Extraction

[0909] HEK293T cells are seeded on 48-well collagen-coated BioCoat plates (Corning) and transfected at approximately 85% confluency. Briefly, HEK293T cells are seeded onto 48-well well Poly-D-Lysine treated BioCoat plates (Corning) at a density of 35,000 cells/well and transfected 18-24 hours after plating. Cells are counted using a NucleoCounter NC-200 (Chemometec). To these cells are added 750 ng of base editor or nuclease, 250 ng of sgRNA, and 10 ng of GFP-max plasmid (Lonza) diluted to 12.5 μL total volume in Opti-MEM reduced serum media (ThermoFisher Scientific). The solution is combined with 1.5 μL of Lipofectamine 2000 (ThermoFisher) in 11 μL of Opti-MEM reduced serum media and left to rest at room temperature for 15 min. The entire 25 μL mixture is then transferred to the pre-seeded Hek293T cells and left to incubate for about 120 h. Following incubation, media is aspirated and cells are washed two times with 250 μL of 1×PBS solution (ThermoFisher Scientific) and 100 μL of freshly prepared lysis buffer is added (100 mM Tris-HCl, pH 7.0, 0.05% SDS, 25 μg/mL Proteinase K (Thermo Fisher Scientific). Transfection plates containing lysis buffer are incubated at 37° C. for 1 hour and the mixture is transferred to a 96-well PCR plate and heated at 80° C. for 30 min.

### Analysis of DNA and RNA Off-Target Editing

[0910] HEK293T cells are plated on 48-well poly-D-lysine coated plates (Corning) 16 to 20 hours before lipofection at a density of 30,000 cells per well in DMEM+Glutamax medium (Thermo Fisher Scientific) without antibiotics. 750 ng nickase, nuclease, or base editor expression plasmid DNA is combined with 250 ng of sgRNA expression plasmid DNA in 15 μl OPTIMEM+Glutamax. This is combined with 10 μl of lipid mixture, comprising 1.5 μl Lipofectamine 2000 and 8.5 μl OPTIMEM+Glutamax per well. Cells are harvested 3 days after transfection and either DNA or RNA is harvested. For DNA analysis, cells are washed once in 1×PBS, and then lysed in 100 μl QuickExtract™ Buffer (Lucigen) according to the manufacturer's instructions. For RNA harvest, the MagMAX™ mirVana™ Total RNA Isolation Kit (Thermo Fisher Scientific) is used with the KingFisher™ Flex Purification System according to the manufacturer's instructions.

[0911] Targeted RNA sequencing is performed largely as previously described (see Rees, H. A. et al., Analysis and minimization of cellular RNA editing by DNA adenine base editors. Sci Adv 5, eaax5717, doi:10.1126/sciadv.aax5717 (2019)). cDNA is prepared from the isolated RNA using the SuperScript IV One-Step RT-PCR System with EZDnase (Thermo Fisher Scientific) according to the manufacturer's instructions. The following program is used: 58° C. for 12 min; 98° C. for 2 min; followed by PCR cycles which varied by amplicon: for CTNNB1 and IP90: 32 cycles of [98° C. for 10 sec; 60° C. for 10 sec; 72° C. for 30 sec] and for RSL1D1 35 cycles of [98° C. for 10 sec; 58° C. for 10 sec; 72° C. for 30 sec]. No RT controls are run concurrently with the samples. Following the combined RT-PCR, amplicons are barcoded and sequenced using an Illumina Miseq as described above. The first 125 nt in each amplicon, beginning at the first base after the end of the forward primer in each amplicon, is aligned to a reference sequence and used for analysis of mean and maximum base editing frequencies in each amplicon.

[0912] Off-target DNA sequencing is performed using previously published primers (see Komor, A. C. et al., Programmable editing of a target base in genomic DNA without double-stranded DNA cleavage. Nature 533, 420-424, doi:10.1038/nature17946 (2016); Rees, H. A. et al., Analysis and minimization of cellular RNA editing by DNA adenine base editors. Sci Adv 5, eaax5717, doi:10.1126/sciadv.aax5717 (2019)) using a two-step PCR and barcoding method to prepare samples for sequencing using Illumina Miseq sequencers.

[0913] Deep sequencing is performed on PCR amplicons from genomic DNA or RNA harvested from duplicate transfections of 293T cells. After validating the quality of PCR product by gel electrophoresis, the PCR products are isolated by gel extraction, e.g., using the Zymoclean Gel DNA Recovery Kit (Zymo Research). Shotgun libraries are prepared without shearing. The library is quantified by qPCR and sequenced on one MiSeq Nano flowcell for 251 cycles from each end of the fragments using a MiSeq 500-cycle sequencing kit version 2. Fastq files are generated and demultiplexed with the bcl2fastq v2.17.1.14 Conversion Software (Illumina).

mRNA Production

[0914] Editors/nucleases are cloned into a plasmid encoding a dT7 promoter followed by a 5′UTR, Kozak sequence, ORF, and 3′UTR. The dT7 promoter carries an inactivating point mutation within the T7 promoter that prevents transcription from circular plasmid. This plasmid templated a PCR reaction (Q5 Hot Start 2X Master Mix), in which the forward primer corrected the SNP within the T7 promoter and the reverse primer appended a 120A tail to the 3′ UTR. The resulting PCR product is purified on a Zymo Research 25 μg DCC column and used as mRNA template in the subsequent in vitro transcription. The NEB HiScribe High-Yield Kit is used as per the instruction manual but with full substitution of N1-methyl-pseudouridine for uridine and co-transcriptional capping with CleanCap AG (Trilink). Reaction cleanup is performed by lithium chloride precipitation.

In Vitro Transcription of sgRNAs.

[0915] Linear DNA fragments containing the CMV promoter followed by the sgRNA target sequence are transcribed in vitro using the TranscriptAid T7 High Yield Transcription Kit (ThermoFisher Scientific) according to the manufacturer's instructions. sgRNA products are purified using the MEGAclear Kit (ThermoFisher Scientific) according to the manufacturer's instructions and quantified by UV absorbance.

Preparation of In Vitro-Edited dsDNA for High-Throughput Sequencing.

[0916] Oligonucleotides are obtained from IDT. Complementary sequences are combined (5 μl of a 100 μM solution) in Tris buffer and annealed by heating to 95° C. for 5 min, followed by a gradual cooling to 45° C. at a rate of 0.1° C. per s to generate 60-bp dsDNA substrates. Purified base editor (20 μl of 1.9 μM in activity buffer) is combined with 1 equivalent of appropriate sgRNA and incubated at ambient temperature for 5 min. The 60-mer dsDNA substrate is added to final concentration of 125 nM, and the resulting solution is incubated at 37° C. for 2 h. The dsDNA is separated from the base editor polypeptide by the addition of buffer PB (100 μl, Qiagen) and isopropanol (25 μl) and purified on a EconoSpin micro spin column (Epoch Life Science), eluting with 20 μl of Tris buffer. The resulting edited DNA (1 μl is used as a template) is amplified by PCR using high-throughput sequencing primer pairs and VeraSeq Ultra (Enzymatics) according to the manufacturer's instructions with 13 cycles of amplification. PCR reaction products are purified using RapidTips (Diffinity Genomics), and the purified DNA is amplified by PCR with primers containing sequencing adapters, purified, and sequenced on a MiSeq high-throughput DNA sequencer (Illumina) as previously described (Pattanayak, Nature Biotechnol. 31, 839-843 (2013)).

### High-Throughput DNA Sequencing

[0917] Samples are sequenced on an Illumina MiSeq as previously described (Pattanayak, Nature Biotechnol. 31, 839-843 (2013)).

### Data Analysis.

[0918] Sequencing reads are automatically demultiplexed using MiSeq Reporter (Illumina), and individual FASTQ files are analysed with a custom Matlab. Each read is pairwise aligned to the appropriate reference sequence using the Smith-Waterman algorithm. Base calls with a Q-score below 31 are replaced with Ns and are thus excluded in calculating nucleotide frequencies. This treatment yields an expected MiSeq base-calling error rate of approximately 1 in 1,000. Aligned sequences in which the read and reference sequence contained no gaps are stored in an alignment table from which base frequencies could be tabulated for each locus. Indel frequencies are quantified with a custom Matlab script using previously described criteria (Zuris, et al., Nature Biotechnol. 33, 73-80 (2015). Sequencing reads are scanned for exact matches to two 10-bp sequences that flank both sides of a window in which indels might occur. If no exact matches are located, the read is excluded from analysis. If the length of this indel window exactly matched the reference sequence the read is classified as not containing an indel. If the indel window is two or more bases longer or shorter than the reference sequence, then the sequencing read is classified as an insertion or deletion, respectively.

### Other Embodiments

[0919] From the foregoing description, it will be apparent that variations and modifications may be made to the invention described herein to adopt it to various usages and conditions. Such embodiments are also within the scope of the following claims.

[0920] The recitation of a listing of elements in any definition of a variable herein includes definitions of that variable as any single element or combination (or subcombination) of listed elements. The recitation of an embodiment herein includes that embodiment as any single embodiment or in combination with any other embodiments or portions thereof.

[0921] All patents and publications mentioned in this specification are herein incorporated by reference to the same extent as if each independent patent and publication was specifically and individually indicated to be incorporated by reference.

What is claimed:

1. A method of editing a nucleobase of a kallikrein B1 (KLKB1) polynucleotide in a cell, the method comprising contacting the KLKB1 polynucleotide with one or more guide polynucleotides and a base editor comprising a fusion protein or a protein complex comprising a nucleic acid programmable DNA binding protein (napDNAbp) domain and a deaminase domain, or a polynucleotide encoding the base editor, wherein said guide polynucleotide targets said base editor to effect an alteration of the nucleobase of the KLKB1 polynucleotide.

2. A method of treating hereditary angioedema in a subject in need thereof, the method comprising administering to a cell of the subject a base editor comprising a fusion protein or protein complex comprising a nucleic acid programmable DNA binding protein (napDNAbp) domain and a deaminase domain, or a polynucleotide encoding the base editor, and a guide polynucleotide that targets the base editor to effect an alteration of a nucleobase of a KLKB1 polynucleotide, thereby treating hereditary angioedema in the subject.

3. The method of claim 1, wherein the guide polynucleotide comprises one or more of the spacers listed in Table 1A or Table 1B.

4. The method of claim 1, wherein the deaminase is an adenosine deaminase or a cytidine deaminase.

5. The method of claim 1, wherein the target base editing efficiency is between at least about 20-50%.

6. The method of claim 1, wherein alteration of the nucleobase is associated with a reduction in transcription of a polynucleotide sequence encoding the KLKB1 protein.

7. The method of claim 1, wherein alteration of the nucleobase in the KLKB1 polynucleotide results in a missense mutation and/or disrupts a splice site.

8. The method of claim 1, wherein the base editor is selected from the group consisting of ABE8.8, IBE3, IBE6, ABE8.8-MQKFRAER, ABE8.8-VRQR, IBE3-MQKFRAER, and IBE6-VRQR.

9. The method of claim 1, wherein the guide polynucleotide comprises a spacer corresponding to or comprising a guide polynucleotide selected from the group consisting of gRNA1074, gRNA1090, gRNA1104, gRNA1108, gRNA1115, gRNA1150, gRNA1151, gRNA1158, gRNA1159, gRNA1166, or gRNA1178.

10. A modified cell comprising an alteration in a nucleobase of an KLKB1 polynucleotide, wherein the alteration is prepared by the method of claim 1, and wherein the alteration reduces or eliminates expression and/or function of the encoded KLKB1 polypeptide as compared to a control cell without the modification.

11. A base editor system comprising a fusion protein or a polynucleotide encoding the fusion protein, wherein the fusion protein comprises a nucleic acid programmable DNA binding protein domain (napDNAbp), a deaminase domain, and a guide polynucleotide that comprises at least 10, 11, 12, 13, 14, 15, 16, 17, 18, 19, or 20 contiguous nucleobases of a spacer listed in Table 1A or Table 1B.

12. The base editor system of claim 11, wherein the guide polynucleotide comprises a spacer corresponding to or comprising a guide polynucleotide selected from the group consisting of gRNA1074, gRNA1090, gRNA1104, gRNA1108, gRNA1115, gRNA1150, gRNA1151, gRNA1158, gRNA1159, gRNA1166, or gRNA1178.

13. A polynucleotide encoding the base editor system of claim 11, or a component thereof.

14. A cell produced by the method of claim 1.

15. A kit comprising a base editor system comprising a fusion protein or a polynucleotide encoding the fusion protein, wherein the fusion protein comprises a nucleic acid programmable DNA binding protein domain (napDNAbp), a deaminase domain, and a guide polynucleotide that comprises least about 10, 11, 12, 13, 14, 15, 16, 17, 18, 19, or 20 contiguous nucleobases of a spacer sequence listed in Table 1A or Table 1B.

16. The kit of claim 15, wherein the guide polynucleotide comprises a spacer corresponding to or comprising a guide polynucleotide selected from the group consisting of gRNA1074, gRNA1090, gRNA1104, gRNA1108, gRNA1115, gRNA1150, gRNA1151, gRNA1158, gRNA1159, gRNA1166, or gRNA1178.

17. The kit of claim 15, wherein the base editor is selected from the group consisting of ABE8.8, IBE3, IBE6, ABE8.8-MQKFRAER, ABE8.8-VRQR, IBE3-MQKFRAER, and IBE6-VRQR.

18. A pharmaceutical composition comprising an effective amount of a base editor system comprising a fusion protein or a polynucleotide encoding the fusion protein, wherein the fusion protein comprises a nucleic acid programmable DNA binding protein domain (napDNAbp), a deaminase domain, and a guide polynucleotide that comprises at least about 10, 11, 12, 13, 14, 15, 16, 17, 18, 19, or 20 contiguous nucleobases of a spacer listed in Table 1A or Table 1B.

19. A guide polynucleotide comprising a sequence listed in Table 1A or Table 1B.

20. A method of modifying an KLKB1 polynucleotide in a cell, the method comprising contacting the KLKB1 polynucleotide with a nucleic acid programmable DNA binding protein domain (napDNAbp) having endonuclease activity on both strands of a double-stranded DNA molecule and a guide polynucleotide, wherein said guide polynucleotide targets said napDNAbp to cleave the KLKB1 polynucleotide, thereby altering the expression or activity of an encoded gene product.

21. A method of treating hereditary angioedema in a subject in need thereof, the method comprising administering to a cell of the subject with a nucleic acid programmable DNA binding protein domain (napDNAbp) having endonuclease activity and a guide polynucleotide, wherein said guide polynucleotide targets said napDNAbp to cleave the KLKB1 polynucleotide, thereby treating hereditary angioedema in the subject.

22. The method of claim 21, wherein the guide polynucleotide comprises a spacer sequence selected from those listed in Table 1A or Table 1B.

The application's sequence listing, which the Patent Office published only in electronic form, follows.

SEQUENCE LISTING (860 sequences)

SEQ ID NO: 1 - protein, 167 aa, Escherichia coli
  REGION 1..167: note = misc_feature - TadA*7.10 (ecTadA) polypeptide sequence
MSEVEFSHEYWMRHALTLAKRARDEREVPVGAVLVLNNRVIGEGWNRAIGLHDPTAHAEIMALRQGGLVMQNYRLIDATLYVTFEPCVMCAGAMIHSRIGRVVFGVRNAKTGAAGSLMDVLHYPGMNHRVEITEGILADECAALLCYFFRMPRQVFNAQKKAQSSTD

SEQ ID NO: 2 - DNA, 4092 bp, synthetic construct
  misc_feature 1..4092: note = BhCas12b GGSGGS-ABE8-Xten20at P153 polynucleotide sequence
  misc_feature 1..6: note = Kozak sequence
  misc_feature 7..57: note = Sequence encoding N-terminal nuclear localization signal
  misc_feature 58..513: note = Sequence encoding BhCas12b
  misc_feature 514..531: note = Sequence encoding a linker
  misc_feature 532..1029: note = Sequence encoding TadA*8
  misc_feature 1030..1089: note = Sequence encoding Xten20 linker
  misc_feature 1090..3954: note = Sequence encoding BhCas12b
  misc_feature 3955..4002: note = Sequence encoding C-terminal NLS
  misc_feature 4003..4008: note = Sequence encoding GS linker
  misc_feature 4009..4089: note = Sequence encoding 3x hemagglutinin (HA) tag
  source 1..4092: mol_type = other DNA
gccaccatggccccaaagaagaagcggaaggtcggtatccacggagtcccagcagccgccaccagatccttcatcctgaagatcgagcccaacgaggaagtgaagaaaggcctctggaaaacccacgaggtgctgaaccacggaatcgcctactacatgaatatcctgaagctgatccggcaagaggccatctacgagcaccacgagcaggaccccaagaatcccaagaaggtgtccaaggccgagatccaggccgagctgtgggatttcgtgctgaagatgcagaagtgcaacagcttcacacacgaggtggacaaggacgaggtgttcaacatcctgagagagctgtacgaggaactggtgcccagcagcgtggaaaagaagggcgaagccaaccagctgagcaacaagtttctgtaccctctggtggaccccaacagccagtctggaaagggaacagccagcagcggcagaaagcccagatggtacaacctgaagattgccggcgatcccggaggctctggaggaagctccgaagtcgagttttcccatgagtactggatgagacacgcattgactctcgcaaagagggctcgagatgaacgcgaggtgcccgtgggggcagtactcgtgctcaacaatcgcgtaatcggcgaaggttggaatagggcaatcggactccacgaccccactgcacatgcggaaatcatggcccttcgacagggagggcttgtgatgcagaattatcgactttatgatgcgacgctgtacgtcacgtttgaaccttgcgtaatgtgcgcgggagctatgattcactcccgcattggacgagttgtattcggtgttcgcaacgccaagacgggtgccgcaggttcactgatggacgtgctgcatcatccaggcatgaaccaccgggtagaaatcacagaaggcatattggcggacgaatgtgcggcgctgttgtgtcgtttttttcgcatgcccaggcgggtctttaacgcccagaaaaaagcacaatcctctactgacggctcttctggatctgaaacacctggcacaagcgagagcgccacccctgagagctctggctcctgggaagaagagaagaagaagtgggaagaagataagaaaaaggacccgctggccaagatcctgggcaagctggctgagtacggactgatccctctgttcatcccctacaccgacagcaacgagcccatcgtgaaagaaatcaagtggatggaaaagtcccggaaccagagcgtgcggcggctggataaggacatgttcattcaggccctggaacggttcctgagctgggagagctggaacctgaaagtgaaagaggaatacgagaaggtcgagaaagagtacaagaccctggaagagaggatcaaagaggacatccaggctctgaaggctctggaacagtatgagaaagagcggcaagaacagctgctgcgggacaccctgaacaccaacgagtaccggctgagcaagagaggccttagaggctggcgggaaatcatccagaaatggctgaaaatggacgagaacgagccctccgagaagtacctggaagtgttcaaggactaccagcggaagcaccctagagaggccggcgattacagcgtgtacgagttcctgtccaagaaagagaaccacttcatctggcggaatcaccctgagtacccctacctgtacgccaccttctgcgagatcgacaagaaaaagaaggacgccaagcagcaggccaccttcacactggccgatcctatcaatcaccctctgtgggtccgattcgaggaaagaagcggcagcaacctgaacaagtacagaatcctgaccgagcagctgcacaccgagaagctgaagaaaaagctgacagtgcagctggaccggctgatctaccctacagaatctggcggctgggaagagaagggcaaagtggacattgtgctgctgcccagccggcagttctacaaccagatcttcctggacatcgaggaaaagggcaagcacgccttcacctacaaggatgagagcatcaagttccctctgaagggcacactcggcggagccagagtgcagttcgacagagatcacctgagaagataccctcacaaggtggaaagcggcaacgtgggcagaatctacttcaacatgaccgtgaacatcgagcctacagagtccccagtgtccaagtctctgaagatccaccgggacgacttccccaaggtggtcaacttcaagcccaaagaactgaccgagtggatcaaggacagcaagggcaagaaactgaagtccggcatcgagtccctggaaatcggcctgagagtgatgagcatcgacctgggacagagacaggccgctgccgcctctattttcgaggtggtggatcagaagcccgacatcgaaggcaagctgtttttcccaatcaagggcaccgagctgtatgccgtgcacagagccagcttcaacatcaagctgcccggcgagacactggtcaagagcagagaagtgctgcggaaggccagagaggacaatctgaaactgatgaaccagaagctcaacttcctgcggaacgtgctgcacttccagcagttcgaggacatcaccgagagagagaagcgggtcaccaagtggatcagcagacaagagaacagcgacgtgcccctggtgtaccaggatgagctgatccagatccgcgagctgatgtacaagccttacaaggactgggtcgccttcctgaagcagctccacaagagactggaagtcgagatcggcaaagaagtgaagcactggcggaagtccctgagcgacggaagaaagggcctgtacggcatctccctgaagaacatcgacgagatcgatcggacccggaagttcctgctgagatggtccctgaggcctaccgaacctggcgaagtgcgtagactggaacccggccagagattcgccatcgaccagctgaatcacctgaacgccctgaaagaagatcggctgaagaagatggccaacaccatcatcatgcacgccctgggctactgctacgacgtgcggaagaagaaatggcaggctaagaaccccgcctgccagatcatcctgttcgaggatctgagcaactacaacccctacgaggaaaggtcccgcttcgagaacagcaagctcatgaagtggtccagacgcgagatccccagacaggttgcactgcagggcgagatctatggcctgcaagtgggagaagtgggcgctcagttcagcagcagattccacgccaagacaggcagccctggcatcagatgtagcgtcgtgaccaaagagaagctgcaggacaatcggttcttcaagaatctgcagagagagggcagactgaccctggacaaaatcgccgtgctgaaagagggcgatctgtacccagacaaaggcggcgagaagttcatcagcctgagcaaggatcggaagtgcgtgaccacacacgccgacatcaacgccgctcagaacctgcagaagcggttctggacaagaacccacggcttctacaaggtgtactgcaaggcctaccaggtggacggccagaccgtgtacatccctgagagcaaggaccagaagcagaagatcatcgaagagttcggcgagggctacttcattctgaaggacggggtgtacgaatgggtcaacgccggcaagctgaaaatcaagaagggcagctccaagcagagcagcagcgagctggtggatagcgacatcctgaaagacagcttcgacctggcctccgagctgaaaggcgaaaagctgatgctgtacagggaccccagcggcaatgtgttccccagcgacaaatggatggccgctggcgtgttcttcggaaagctggaacgcatcctgatcagcaagctgaccaaccagtactccatcagcaccatcgaggacgacagcagcaagcagtctatgaaaaggccggcggccacgaaaaaggccggccaggcaaaaaagaaaaagggatcctacccatacgatgttccagattacgcttatccctacgacgtgcctgattatgcatacccatatgatgtccccgactatgcctaa

SEQ ID NO: 3 - protein, 1361 aa, synthetic construct
  REGION 1..1361: note = BhCas12b GGSGGS-ABE8-Xten20at P153 polypeptide sequence
MAPKKKRKVGIHGVPAAATRSFILKIEPNEEVKKGLWKTHEVLNHGIAYYMNILKLIRQEAIYEHHEQDPKNPKKVSKAEIQAELWDFVLKMQKCNSFTHEVDKDEVFNILRELYEELVPSSVEKKGEANQLSNKFLYPLVDPNSQSGKGTASSGRKPRWYNLKIAGDPGGSGGSSEVEFSHEYWMRHALTLAKRARDEREVPVGAVLVLNNRVIGEGWNRAIGLHDPTAHAEIMALRQGGLVMQNYRLYDATLYVTFEPCVMCAGAMIHSRIGRVVFGVRNAKTGAAGSLMDVLHHPGMNHRVEITEGILADECAALLCRFFRMPRRVFNAQKKAQSSTDGSSGSETPGTSESATPESSGSWEEEKKKWEEDKKKDPLAKILGKLAEYGLIPLFIPYTDSNEPIVKEIKWMEKSRNQSVRRLDKDMFIQALERFLSWESWNLKVKEEYEKVEKEYKTLEERIKEDIQALKALEQYEKERQEQLLRDTLNTNEYRLSKRGLRGWREIIQKWLKMDENEPSEKYLEVFKDYQRKHPREAGDYSVYEFLSKKENHFIWRNHPEYPYLYATFCEIDKKKKDAKQQATFTLADPINHPLWVRFEERSGSNLNKYRILTEQLHTEKLKKKLTVQLDRLIYPTESGGWEEKGKVDIVLLPSRQFYNQIFLDIEEKGKHAFTYKDESIKFPLKGTLGGARVQFDRDHLRRYPHKVESGNVGRIYFNMTVNIEPTESPVSKSLKIHRDDFPKVVNFKPKELTEWIKDSKGKKLKSGIESLEIGLRVMSIDLGQRQAAAASIFEVVDQKPDIEGKLFFPIKGTELYAVHRASFNIKLPGETLVKSREVLRKAREDNLKLMNQKLNFLRNVLHFQQFEDITEREKRVTKWISRQENSDVPLVYQDELIQIRELMYKPYKDWVAFLKQLHKRLEVEIGKEVKHWRKSLSDGRKGLYGISLKNIDEIDRTRKFLLRWSLRPTEPGEVRRLEPGQRFAIDQLNHLNALKEDRLKKMANTIIMHALGYCYDVRKKKWQAKNPACQIILFEDLSNYNPYEERSRFENSKLMKWSRREIPRQVALQGEIYGLQVGEVGAQFSSRFHAKTGSPGIRCSVVTKEKLQDNRFFKNLQREGRLTLDKIAVLKEGDLYPDKGGEKFISLSKDRKCVTTHADINAAQNLQKRFWTRTHGFYKVYCKAYQVDGQTVYIPESKDQKQKIIEEFGEGYFILKDGVYEWVNAGKLKIKKGSSKQSSSELVDSDILKDSFDLASELKGEKLMLYRDPSGNVFPSDKWMAAGVFFGKLERILISKLTNQYSISTIEDDSSKQSMKRPAATKKAGQAKKKKGSYPYDVPDYAYPYDVPDYAYPYDVPDYA

SEQ ID NO: 4 - DNA, 4092 bp, synthetic construct
  misc_feature 1..4092: note = BhCas12b GGSGGS-ABE8-Xten20at K255 polynucleotide sequence
  misc_feature 1..6: note = Kozak sequence
  misc_feature 7..57: note = Sequence encoding N-terminal nuclear localization signal (NLS)
  misc_feature 58..822: note = Sequence encoding BhCas12b
  misc_feature 823..840: note = Sequence encoding a linker
  misc_feature 841..1338: note = Sequence encoding TadA*8
  misc_feature 1339..1398: note = Sequence encoding Xten20 linker
  misc_feature 1399..3954: note = Sequence encoding BhCas12b
  misc_feature 3955..4002: note = Sequence encoding C-terminal NLS
  misc_feature 4003..4008: note = Sequence encoding a GS linker
  misc_feature 4009..4089: note = Sequence encoding 3x hemagglutinin (HA) tag
  source 1..4092: mol_type = other DNA
gccaccatggccccaaagaagaagcggaaggtcggtatccacggagtcccagcagccgccaccagatccttcatcctgaagatcgagcccaacgaggaagtgaagaaaggcctctggaaaacccacgaggtgctgaaccacggaatcgcctactacatgaatatcctgaagctgatccggcaagaggccatctacgagcaccacgagcaggaccccaagaatcccaagaaggtgtccaaggccgagatccaggccgagctgtgggatttcgtgctgaagatgcagaagtgcaacagcttcacacacgaggtggacaaggacgaggtgttcaacatcctgagagagctgtacgaggaactggtgcccagcagcgtggaaaagaagggcgaagccaaccagctgagcaacaagtttctgtaccctctggtggaccccaacagccagtctggaaagggaacagccagcagcggcagaaagcccagatggtacaacctgaagattgccggcgatccctcctgggaagaagagaagaagaagtgggaagaagataagaaaaaggacccgctggccaagatcctgggcaagctggctgagtacggactgatccctctgttcatcccctacaccgacagcaacgagcccatcgtgaaagaaatcaagtggatggaaaagtcccggaaccagagcgtgcggcggctggataaggacatgttcattcaggccctggaacggttcctgagctgggagagctggaacctgaaagtgaaagaggaatacgagaaggtcgagaaagagtacaagaccctggaagagaggatcaaaggaggctctggaggaagctccgaagtcgagttttcccatgagtactggatgagacacgcattgactctcgcaaagagggctcgagatgaacgcgaggtgcccgtgggggcagtactcgtgctcaacaatcgcgtaatcggcgaaggttggaatagggcaatcggactccacgaccccactgcacatgcggaaatcatggcccttcgacagggagggcttgtgatgcagaattatcgactttatgatgcgacgctgtacgtcacgtttgaaccttgcgtaatgtgcgcgggagctatgattcactcccgcattggacgagttgtattcggtgttcgcaacgccaagacgggtgccgcaggttcactgatggacgtgctgcatcatccaggcatgaaccaccgggtagaaatcacagaaggcatattggcggacgaatgtgcggcgctgttgtgtcgtttttttcgcatgcccaggcgggtctttaacgcccagaaaaaagcacaatcctctactgacggctcttctggatctgaaacacctggcacaagcgagagcgccacccctgagagctctggcgaggacatccaggctctgaaggctctggaacagtatgagaaagagcggcaagaacagctgctgcgggacaccctgaacaccaacgagtaccggctgagcaagagaggccttagaggctggcgggaaatcatccagaaatggctgaaaatggacgagaacgagccctccgagaagtacctggaagtgttcaaggactaccagcggaagcaccctagagaggccggcgattacagcgtgtacgagttcctgtccaagaaagagaaccacttcatctggcggaatcaccctgagtacccctacctgtacgccaccttctgcgagatcgacaagaaaaagaaggacgccaagcagcaggccaccttcacactggccgatcctatcaatcaccctctgtgggtccgattcgaggaaagaagcggcagcaacctgaacaagtacagaatcctgaccgagcagctgcacaccgagaagctgaagaaaaagctgacagtgcagctggaccggctgatctaccctacagaatctggcggctgggaagagaagggcaaagtggacattgtgctgctgcccagccggcagttctacaaccagatcttcctggacatcgaggaaaagggcaagcacgccttcacctacaaggatgagagcatcaagttccctctgaagggcacactcggcggagccagagtgcagttcgacagagatcacctgagaagataccctcacaaggtggaaagcggcaacgtgggcagaatctacttcaacatgaccgtgaacatcgagcctacagagtccccagtgtccaagtctctgaagatccaccgggacgacttccccaaggtggtcaacttcaagcccaaagaactgaccgagtggatcaaggacagcaagggcaagaaactgaagtccggcatcgagtccctggaaatcggcctgagagtgatgagcatcgacctgggacagagacaggccgctgccgcctctattttcgaggtggtggatcagaagcccgacatcgaaggcaagctgtttttcccaatcaagggcaccgagctgtatgccgtgcacagagccagcttcaacatcaagctgcccggcgagacactggtcaagagcagagaagtgctgcggaaggccagagaggacaatctgaaactgatgaaccagaagctcaacttcctgcggaacgtgctgcacttccagcagttcgaggacatcaccgagagagagaagcgggtcaccaagtggatcagcagacaagagaacagcgacgtgcccctggtgtaccaggatgagctgatccagatccgcgagctgatgtacaagccttacaaggactgggtcgccttcctgaagcagctccacaagagactggaagtcgagatcggcaaagaagtgaagcactggcggaagtccctgagcgacggaagaaagggcctgtacggcatctccctgaagaacatcgacgagatcgatcggacccggaagttcctgctgagatggtccctgaggcctaccgaacctggcgaagtgcgtagactggaacccggccagagattcgccatcgaccagctgaatcacctgaacgccctgaaagaagatcggctgaagaagatggccaacaccatcatcatgcacgccctgggctactgctacgacgtgcggaagaagaaatggcaggctaagaaccccgcctgccagatcatcctgttcgaggatctgagcaactacaacccctacgaggaaaggtcccgcttcgagaacagcaagctcatgaagtggtccagacgcgagatccccagacaggttgcactgcagggcgagatctatggcctgcaagtgggagaagtgggcgctcagttcagcagcagattccacgccaagacaggcagccctggcatcagatgtagcgtcgtgaccaaagagaagctgcaggacaatcggttcttcaagaatctgcagagagagggcagactgaccctggacaaaatcgccgtgctgaaagagggcgatctgtacccagacaaaggcggcgagaagttcatcagcctgagcaaggatcggaagtgcgtgaccacacacgccgacatcaacgccgctcagaacctgcagaagcggttctggacaagaacccacggcttctacaaggtgtactgcaaggcctaccaggtggacggccagaccgtgtacatccctgagagcaaggaccagaagcagaagatcatcgaagagttcggcgagggctacttcattctgaaggacggggtgtacgaatgggtcaacgccggcaagctgaaaatcaagaagggcagctccaagcagagcagcagcgagctggtggatagcgacatcctgaaagacagcttcgacctggcctccgagctgaaaggcgaaaagctgatgctgtacagggaccccagcggcaatgtgttccccagcgacaaatggatggccgctggcgtgttcttcggaaagctggaacgcatcctgatcagcaagctgaccaaccagtactccatcagcaccatcgaggacgacagcagcaagcagtctatgaaaaggccggcggccacgaaaaaggccggccaggcaaaaaagaaaaagggatcctacccatacgatgttccagattacgcttatccctacgacgtgcctgattatgcatacccatatgatgtccccgactatgcctaa

SEQ ID NO: 5 - protein, 1361 aa, synthetic construct
  REGION 1..1361: note = BhCas12b GGSGGS-ABE8-Xten20at K255 polypeptide sequence
MAPKKKRKVGIHGVPAAATRSFILKIEPNEEVKKGLWKTHEVLNHGIAYYMNILKLIRQEAIYEHHEQDPKNPKKVSKAEIQAELWDFVLKMQKCNSFTHEVDKDEVFNILRELYEELVPSSVEKKGEANQLSNKFLYPLVDPNSQSGKGTASSGRKPRWYNLKIAGDPSWEEEKKKWEEDKKKDPLAKILGKLAEYGLIPLFIPYTDSNEPIVKEIKWMEKSRNQSVRRLDKDMFIQALERFLSWESWNLKVKEEYEKVEKEYKTLEERIKGGSGGSSEVEFSHEYWMRHALTLAKRARDEREVPVGAVLVLNNRVIGEGWNRAIGLHDPTAHAEIMALRQGGLVMQNYRLYDATLYVTFEPCVMCAGAMIHSRIGRVVFGVRNAKTGAAGSLMDVLHHPGMNHRVEITEGILADECAALLCRFFRMPRRVFNAQKKAQSSTDGSSGSETPGTSESATPESSGEDIQALKALEQYEKERQEQLLRDTLNTNEYRLSKRGLRGWREIIQKWLKMDENEPSEKYLEVFKDYQRKHPREAGDYSVYEFLSKKENHFIWRNHPEYPYLYATFCEIDKKKKDAKQQATFTLADPINHPLWVRFEERSGSNLNKYRILTEQLHTEKLKKKLTVQLDRLIYPTESGGWEEKGKVDIVLLPSRQFYNQIFLDIEEKGKHAFTYKDESIKFPLKGTLGGARVQFDRDHLRRYPHKVESGNVGRIYFNMTVNIEPTESPVSKSLKIHRDDFPKVVNFKPKELTEWIKDSKGKKLKSGIESLEIGLRVMSIDLGQRQAAAASIFEVVDQKPDIEGKLFFPIKGTELYAVHRASFNIKLPGETLVKSREVLRKAREDNLKLMNQKLNFLRNVLHFQQFEDITEREKRVTKWISRQENSDVPLVYQDELIQIRELMYKPYKDWVAFLKQLHKRLEVEIGKEVKHWRKSLSDGRKGLYGISLKNIDEIDRTRKFLLRWSLRPTEPGEVRRLEPGQRFAIDQLNHLNALKEDRLKKMANTIIMHALGYCYDVRKKKWQAKNPACQIILFEDLSNYNPYEERSRFENSKLMKWSRREIPRQVALQGEIYGLQVGEVGAQFSSRFHAKTGSPGIRCSVVTKEKLQDNRFFKNLQREGRLTLDKIAVLKEGDLYPDKGGEKFISLSKDRKCVTTHADINAAQNLQKRFWTRTHGFYKVYCKAYQVDGQTVYIPESKDQKQKIIEEFGEGYFILKDGVYEWVNAGKLKIKKGSSKQSSSELVDSDILKDSFDLASELKGEKLMLYRDPSGNVFPSDKWMAAGVFFGKLERILISKLTNQYSISTIEDDSSKQSMKRPAATKKAGQAKKKKGSYPYDVPDYAYPYDVPDYAYPYDVPDYA

SEQ ID NO: 6 - DNA, 4092 bp, synthetic construct
  misc_feature 1..4092: note = BhCas12b GGSGGS-ABE8-Xten20at D306 polynucleotide sequence
  misc_feature 1..6: note = Kozak sequence
  misc_feature 7..57: note = Sequence encoding N-terminal nuclear localization signal (NLS)
  misc_feature 58..975: note = Sequence encoding BhCas12b
  misc_feature 976..993: note = Sequence encoding a linker
  misc_feature 994..1491: note = Sequence encoding TadA*8
  misc_feature 1492..1551: note = Sequence encoding Xten20 linker
  misc_feature 1552..3954: note = Sequence encoding BhCas12b
  misc_feature 3955..4002: note = Sequence encoding C-terminal NLS
  misc_feature 4003..4008: note = Sequence encoding a GS linker
  misc_feature 4009..4089: note = Sequence encoding 3x hemagglutinin (HA) tag
  source 1..4092: mol_type = other DNA
gccaccatggccccaaagaagaagcggaaggtcggtatccacggagtcccagcagccgccaccagatccttcatcctgaagatcgagcccaacgaggaagtgaagaaaggcctctggaaaacccacgaggtgctgaaccacggaatcgcctactacatgaatatcctgaagctgatccggcaagaggccatctacgagcaccacgagcaggaccccaagaatcccaagaaggtgtccaaggccgagatccaggccgagctgtgggatttcgtgctgaagatgcagaagtgcaacagcttcacacacgaggtggacaaggacgaggtgttcaacatcctgagagagctgtacgaggaactggtgcccagcagcgtggaaaagaagggcgaagccaaccagctgagcaacaagtttctgtaccctctggtggaccccaacagccagtctggaaagggaacagccagcagcggcagaaagcccagatggtacaacctgaagattgccggcgatccctcctgggaagaagagaagaagaagtgggaagaagataagaaaaaggacccgctggccaagatcctgggcaagctggctgagtacggactgatccctctgttcatcccctacaccgacagcaacgagcccatcgtgaaagaaatcaagtggatggaaaagtcccggaaccagagcgtgcggcggctggataaggacatgttcattcaggccctggaacggttcctgagctgggagagctggaacctgaaagtgaaagaggaatacgagaaggtcgagaaagagtacaagaccctggaagagaggatcaaagaggacatccaggctctgaaggctctggaacagtatgagaaagagcggcaagaacagctgctgcgggacaccctgaacaccaacgagtaccggctgagcaagagaggccttagaggctggcgggaaatcatccagaaatggctgaaaatggacggaggctctggaggaagctccgaagtcgagttttcccatgagtactggatgagacacgcattgactctcgcaaagagggctcgagatgaacgcgaggtgcccgtgggggcagtactcgtgctcaacaatcgcgtaatcggcgaaggttggaatagggcaatcggactccacgaccccactgcacatgcggaaatcatggcccttcgacagggagggcttgtgatgcagaattatcgactttatgatgcgacgctgtacgtcacgtttgaaccttgcgtaatgtgcgcgggagctatgattcactcccgcattggacgagttgtattcggtgttcgcaacgccaagacgggtgccgcaggttcactgatggacgtgctgcatcatccaggcatgaaccaccgggtagaaatcacagaaggcatattggcggacgaatgtgcggcgctgttgtgtcgtttttttcgcatgcccaggcgggtctttaacgcccagaaaaaagcacaatcctctactgacggctcttctggatctgaaacacctggcacaagcgagagcgccacccctgagagctctggcgagaacgagccctccgagaagtacctggaagtgttcaaggactaccagcggaagcaccctagagaggccggcgattacagcgtgtacgagttcctgtccaagaaagagaaccacttcatctggcggaatcaccctgagtacccctacctgtacgccaccttctgcgagatcgacaagaaaaagaaggacgccaagcagcaggccaccttcacactggccgatcctatcaatcaccctctgtgggtccgattcgaggaaagaagcggcagcaacctgaacaagtacagaatcctgaccgagcagctgcacaccgagaagctgaagaaaaagctgacagtgcagctggaccggctgatctaccctacagaatctggcggctgggaagagaagggcaaagtggacattgtgctgctgcccagccggcagttctacaaccagatcttcctggacatcgaggaaaagggcaagcacgccttcacctacaaggatgagagcatcaagttccctctgaagggcacactcggcggagccagagtgcagttcgacagagatcacctgagaagataccctcacaaggtggaaagcggcaacgtgggcagaatctacttcaacatgaccgtgaacatcgagcctacagagtccccagtgtccaagtctctgaagatccaccgggacgacttccccaaggtggtcaacttcaagcccaaagaactgaccgagtggatcaaggacagcaagggcaagaaactgaagtccggcatcgagtccctggaaatcggcctgagagtgatgagcatcgacctgggacagagacaggccgctgccgcctctattttcgaggtggtggatcagaagcccgacatcgaaggcaagctgtttttcccaatcaagggcaccgagctgtatgccgtgcacagagccagcttcaacatcaagctgcccggcgagacactggtcaagagcagagaagtgctgcggaaggccagagaggacaatctgaaactgatgaaccagaagctcaacttcctgcggaacgtgctgcacttccagcagttcgaggacatcaccgagagagagaagcgggtcaccaagtggatcagcagacaagagaacagcgacgtgcccctggtgtaccaggatgagctgatccagatccgcgagctgatgtacaagccttacaaggactgggtcgccttcctgaagcagctccacaagagactggaagtcgagatcggcaaagaagtgaagcactggcggaagtccctgagcgacggaagaaagggcctgtacggcatctccctgaagaacatcgacgagatcgatcggacccggaagttcctgctgagatggtccctgaggcctaccgaacctggcgaagtgcgtagactggaacccggccagagattcgccatcgaccagctgaatcacctgaacgccctgaaagaagatcggctgaagaagatggccaacaccatcatcatgcacgccctgggctactgctacgacgtgcggaagaagaaatggcaggctaagaaccccgcctgccagatcatcctgttcgaggatctgagcaactacaacccctacgaggaaaggtcccgcttcgagaacagcaagctcatgaagtggtccagacgcgagatccccagacaggttgcactgcagggcgagatctatggcctgcaagtgggagaagtgggcgctcagttcagcagcagattccacgccaagacaggcagccctggcatcagatgtagcgtcgtgaccaaagagaagctgcaggacaatcggttcttcaagaatctgcagagagagggcagactgaccctggacaaaatcgccgtgctgaaagagggcgatctgtacccagacaaaggcggcgagaagttcatcagcctgagcaaggatcggaagtgcgtgaccacacacgccgacatcaacgccgctcagaacctgcagaagcggttctggacaagaacccacggcttctacaaggtgtactgcaaggcctaccaggtggacggccagaccgtgtacatccctgagagcaaggaccagaagcagaagatcatcgaagagttcggcgagggctacttcattctgaaggacggggtgtacgaatgggtcaacgccggcaagctgaaaatcaagaagggcagctccaagcagagcagcagcgagctggtggatagcgacatcctgaaagacagcttcgacctggcctccgagctgaaaggcgaaaagctgatgctgtacagggaccccagcggcaatgtgttccccagcgacaaatggatggccgctggcgtgttcttcggaaagctggaacgcatcctgatcagcaagctgaccaaccagtactccatcagcaccatcgaggacgacagcagcaagcagtctatgaaaaggccggcggccacgaaaaaggccggccaggcaaaaaagaaaaagggatcctacccatacgatgttccagattacgcttatccctacgacgtgcctgattatgcatacccatatgatgtccccgactatgcctaa

SEQ ID NO: 7 - protein, 1361 aa, synthetic construct
  REGION 1..1361: note = BhCas12b GGSGGS-ABE8-Xten20at D306 polypeptide sequence
MAPKKKRKVGIHGVPAAATRSFILKIEPNEEVKKGLWKTHEVLNHGIAYYMNILKLIRQEAIYEHHEQDPKNPKKVSKAEIQAELWDFVLKMQKCNSFTHEVDKDEVFNILRELYEELVPSSVEKKGEANQLSNKFLYPLVDPNSQSGKGTASSGRKPRWYNLKIAGDPSWEEEKKKWEEDKKKDPLAKILGKLAEYGLIPLFIPYTDSNEPIVKEIKWMEKSRNQSVRRLDKDMFIQALERFLSWESWNLKVKEEYEKVEKEYKTLEERIKEDIQALKALEQYEKERQEQLLRDTLNTNEYRLSKRGLRGWREIIQKWLKMDGGSGGSSEVEFSHEYWMRHALTLAKRARDEREVPVGAVLVLNNRVIGEGWNRAIGLHDPTAHAEIMALRQGGLVMQNYRLYDATLYVTFEPCVMCAGAMIHSRIGRVVFGVRNAKTGAAGSLMDVLHHPGMNHRVEITEGILADECAALLCRFFRMPRRVFNAQKKAQSSTDGSSGSETPGTSESATPESSGENEPSEKYLEVFKDYQRKHPREAGDYSVYEFLSKKENHFIWRNHPEYPYLYATFCEIDKKKKDAKQQATFTLADPINHPLWVRFEERSGSNLNKYRILTEQLHTEKLKKKLTVQLDRLIYPTESGGWEEKGKVDIVLLPSRQFYNQIFLDIEEKGKHAFTYKDESIKFPLKGTLGGARVQFDRDHLRRYPHKVESGNVGRIYFNMTVNIEPTESPVSKSLKIHRDDFPKVVNFKPKELTEWIKDSKGKKLKSGIESLEIGLRVMSIDLGQRQAAAASIFEVVDQKPDIEGKLFFPIKGTELYAVHRASFNIKLPGETLVKSREVLRKAREDNLKLMNQKLNFLRNVLHFQQFEDITEREKRVTKWISRQENSDVPLVYQDELIQIRELMYKPYKDWVAFLKQLHKRLEVEIGKEVKHWRKSLSDGRKGLYGISLKNIDEIDRTRKFLLRWSLRPTEPGEVRRLEPGQRFAIDQLNHLNALKEDRLKKMANTIIMHALGYCYDVRKKKWQAKNPACQIILFEDLSNYNPYEERSRFENSKLMKWSRREIPRQVALQGEIYGLQVGEVGAQFSSRFHAKTGSPGIRCSVVTKEKLQDNRFFKNLQREGRLTLDKIAVLKEGDLYPDKGGEKFISLSKDRKCVTTHADINAAQNLQKRFWTRTHGFYKVYCKAYQVDGQTVYIPESKDQKQKIIEEFGEGYFILKDGVYEWVNAGKLKIKKGSSKQSSSELVDSDILKDSFDLASELKGEKLMLYRDPSGNVFPSDKWMAAGVFFGKLERILISKLTNQYSISTIEDDSSKQSMKRPAATKKAGQAKKKKGSYPYDVPDYAYPYDVPDYAYPYDVPDYA

SEQ ID NO: 8 - DNA, 4092 bp, synthetic construct
  misc_feature 1..4092: note = BhCas12b GGSGGS-ABE8-Xten20at D980 polynucleotide sequence
  misc_feature 1..6: note = Kozak sequence
  misc_feature 7..57: note = Sequence encoding N-terminal nuclear localization signal (NLS)
  misc_feature 58..2997: note = Sequence encoding BhCas12b
  misc_feature 2998..3015: note = Sequence encoding a linker
  misc_feature 3016..3513: note = Sequence encoding TadA*8
  misc_feature 3514..3573: note = Sequence encoding Xten20 linker
  misc_feature 3574..3954: note = Sequence encoding BhCas12b
  misc_feature 3955..4002: note = Sequence encoding C-terminal NLS
  misc_feature 4003..4008: note = Sequence encoding a GS linker
  misc_feature 4009..4089: note = Sequence encoding 3x hemagglutinin (HA) tag
  source 1..4092: mol_type = other DNA
gccaccatggccccaaagaagaagcggaaggtcggtatccacggagtcccagcagccgccaccagatccttcatcctgaagatcgagcccaacgaggaagtgaagaaaggcctctggaaaacccacgaggtgctgaaccacggaatcgcctactacatgaatatcctgaagctgatccggcaagaggccatctacgagcaccacgagcaggaccccaagaatcccaagaaggtgtccaaggccgagatccaggccgagctgtgggatttcgtgctgaagatgcagaagtgcaacagcttcacacacgaggtggacaaggacgaggtgttcaacatcctgagagagctgtacgaggaactggtgcccagcagcgtggaaaagaagggcgaagccaaccagctgagcaacaagtttctgtaccctctggtggaccccaacagccagtctggaaagggaacagccagcagcggcagaaagcccagatggtacaacctgaagattgccggcgatccctcctgggaagaagagaagaagaagtgggaagaagataagaaaaaggacccgctggccaagatcctgggcaagctggctgagtacggactgatccctctgttcatcccctacaccgacagcaacgagcccatcgtgaaagaaatcaagtggatggaaaagtcccggaaccagagcgtgcggcggctggataaggacatgttcattcaggccctggaacggttcctgagctgggagagctggaacctgaaagtgaaagaggaatacgagaaggtcgagaaagagtacaagaccctggaagagaggatcaaagaggacatccaggctctgaaggctctggaacagtatgagaaagagcggcaagaacagctgctgcgggacaccctgaacaccaacgagtaccggctgagcaagagaggccttagaggctggcgggaaatcatccagaaatggctgaaaatggacgagaacgagccctccgagaagtacctggaagtgttcaaggactaccagcggaagcaccctagagaggccggcgattacagcgtgtacgagttcctgtccaagaaagagaaccacttcatctggcggaatcaccctgagtacccctacctgtacgccaccttctgcgagatcgacaagaaaaagaaggacgccaagcagcaggccaccttcacactggccgatcctatcaatcaccctctgtgggtccgattcgaggaaagaagcggcagcaacctgaacaagtacagaatcctgaccgagcagctgcacaccgagaagctgaagaaaaagctgacagtgcagctggaccggctgatctaccctacagaatctggcggctgggaagagaagggcaaagtggacattgtgctgctgcccagccggcagttctacaaccagatcttcctggacatcgaggaaaagggcaagcacgccttcacctacaaggatgagagcatcaagttccctctgaagggcacactcggcggagccagagtgcagttcgacagagatcacctgagaagataccctcacaaggtggaaagcggcaacgtgggcagaatctacttcaacatgaccgtgaacatcgagcctacagagtccccagtgtccaagtctctgaagatccaccgggacgacttccccaaggtggtcaacttcaagcccaaagaactgaccgagtggatcaaggacagcaagggcaagaaactgaagtccggcatcgagtccctggaaatcggcctgagagtgatgagcatcgacctgggacagagacaggccgctgccgcctctattttcgaggtggtggatcagaagcccgacatcgaaggcaagctgtttttcccaatcaagggcaccgagctgtatgccgtgcacagagccagcttcaacatcaagctgcccggcgagacactggtcaagagcagagaagtgctgcggaaggccagagaggacaatctgaaactgatgaaccagaagctcaacttcctgcggaacgtgctgcacttccagcagttcgaggacatcaccgagagagagaagcgggtcaccaagtggatcagcagacaagagaacagcgacgtgcccctggtgtaccaggatgagctgatccagatccgcgagctgatgtacaagccttacaaggactgggtcgccttcctgaagcagctccacaagagactggaagtcgagatcggcaaagaagtgaagcactggcggaagtccctgagcgacggaagaaagggcctgtacggcatctccctgaagaacatcgacgagatcgatcggacccggaagttcctgctgagatggtccctgaggcctaccgaacctggcgaagtgcgtagactggaacccggccagagattcgccatcgaccagctgaatcacctgaacgccctgaaagaagatcggctgaagaagatggccaacaccatcatcatgcacgccctgggctactgctacgacgtgcggaagaagaaatggcaggctaagaaccccgcctgccagatcatcctgttcgaggatctgagcaactacaacccctacgaggaaaggtcccgcttcgagaacagcaagctcatgaagtggtccagacgcgagatccccagacaggttgcactgcagggcgagatctatggcctgcaagtgggagaagtgggcgctcagttcagcagcagattccacgccaagacaggcagccctggcatcagatgtagcgtcgtgaccaaagagaagctgcaggacaatcggttcttcaagaatctgcagagagagggcagactgaccctggacaaaatcgccgtgctgaaagagggcgatctgtacccagacaaaggcggcgagaagttcatcagcctgagcaaggatcggaagtgcgtgaccacacacgccgacatcaacgccgctcagaacctgcagaagcggttctggacaagaacccacggcttctacaaggtgtactgcaaggcctaccaggtggacggaggctctggaggaagctccgaagtcgagttttcccatgagtactggatgagacacgcattgactctcgcaaagagggctcgagatgaacgcgaggtgcccgtgggggcagtactcgtgctcaacaatcgcgtaatcggcgaaggttggaatagggcaatcggactccacgaccccactgcacatgcggaaatcatggcccttcgacagggagggcttgtgatgcagaattatcgactttatgatgcgacgctgtacgtcacgtttgaaccttgcgtaatgtgcgcgggagctatgattcactcccgcattggacgagttgtattcggtgttcgcaacgccaagacgggtgccgcaggttcactgatggacgtgctgcatcatccaggcatgaaccaccgggtagaaatcacagaaggcatattggcggacgaatgtgcggcgctgttgtgtcgtttttttcgcatgcccaggcgggtctttaacgcccagaaaaaagcacaatcctctactgacggctcttctggatctgaaacacctggcacaagcgagagcgccacccctgagagctctggcggccagaccgtgtacatccctgagagcaaggaccagaagcagaagatcatcgaagagttcggcgagggctacttcattctgaaggacggggtgtacgaatgggtcaacgccggcaagctgaaaatcaagaagggcagctccaagcagagcagcagcgagctggtggatagcgacatcctgaaagacagcttcgacctggcctccgagctgaaaggcgaaaagctgatgctgtacagggaccccagcggcaatgtgttccccagcgacaaatggatggccgctggcgtgttcttcggaaagctggaacgcatcctgatcagcaagctgaccaaccagtactccatcagcaccatcgaggacgacagcagcaagcagtctatgaaaaggccggcggccacgaaaaaggccggccaggcaaaaaagaaaaagggatcctacccatacgatgttccagattacgcttatccctacgacgtgcctgattatgcatacccatatgatgtccccgactatgcctaa

SEQ ID NO: 9 - protein, 1361 aa, synthetic construct
  REGION 1..1361: note = BhCas12b GGSGGS-ABE8-Xten20at D980 polypeptide sequence
MAPKKKRKVGIHGVPAAATRSFILKIEPNEEVKKGLWKTHEVLNHGIAYYMNILKLIRQEAIYEHHEQDPKNPKKVSKAEIQAELWDFVLKMQKCNSFTHEVDKDEVFNILRELYEELVPSSVEKKGEANQLSNKFLYPLVDPNSQSGKGTASSGRKPRWYNLKIAGDPSWEEEKKKWEEDKKKDPLAKILGKLAEYGLIPLFIPYTDSNEPIVKEIKWMEKSRNQSVRRLDKDMFIQALERFLSWESWNLKVKEEYEKVEKEYKTLEERIKEDIQALKALEQYEKERQEQLLRDTLNTNEYRLSKRGLRGWREIIQKWLKMDENEPSEKYLEVFKDYQRKHPREAGDYSVYEFLSKKENHFIWRNHPEYPYLYATFCEIDKKKKDAKQQATFTLADPINHPLWVRFEERSGSNLNKYRILTEQLHTEKLKKKLTVQLDRLIYPTESGGWEEKGKVDIVLLPSRQFYNQIFLDIEEKGKHAFTYKDESIKFPLKGTLGGARVQFDRDHLRRYPHKVESGNVGRIYFNMTVNIEPTESPVSKSLKIHRDDFPKVVNFKPKELTEWIKDSKGKKLKSGIESLEIGLRVMSIDLGQRQAAAASIFEVVDQKPDIEGKLFFPIKGTELYAVHRASFNIKLPGETLVKSREVLRKAREDNLKLMNQKLNFLRNVLHFQQFEDITEREKRVTKWISRQENSDVPLVYQDELIQIRELMYKPYKDWVAFLKQLHKRLEVEIGKEVKHWRKSLSDGRKGLYGISLKNIDEIDRTRKFLLRWSLRPTEPGEVRRLEPGQRFAIDQLNHLNALKEDRLKKMANTIIMHALGYCYDVRKKKWQAKNPACQIILFEDLSNYNPYEERSRFENSKLMKWSRREIPRQVALQGEIYGLQVGEVGAQFSSRFHAKTGSPGIRCSVVTKEKLQDNRFFKNLQREGRLTLDKIAVLKEGDLYPDKGGEKFISLSKDRKCVTTHADINAAQNLQKRFWTRTHGFYKVYCKAYQVDGGSGGSSEVEFSHEYWMRHALTLAKRARDEREVPVGAVLVLNNRVIGEGWNRAIGLHDPTAHAEIMALRQGGLVMQNYRLYDATLYVTFEPCVMCAGAMIHSRIGRVVFGVRNAKTGAAGSLMDVLHHPGMNHRVEITEGILADECAALLCRFFRMPRRVFNAQKKAQSSTDGSSGSETPGTSESATPESSGGQTVYIPESKDQKQKIIEEFGEGYFILKDGVYEWVNAGKLKIKKGSSKQSSSELVDSDILKDSFDLASELKGEKLMLYRDPSGNVFPSDKWMAAGVFFGKLERILISKLTNQYSISTIEDDSSKQSMKRPAATKKAGQAKKKKGSYPYDVPDYAYPYDVPDYAYPYDVPDYA

SEQ ID NO: 10 - DNA, 4092 bp, synthetic construct
  misc_feature 1..4092: note = BhCas12b GGSGGS-ABE8-Xten20at K1019 polynucleotide sequence
  misc_feature 1..6: note = Kozak sequence
  misc_feature 7..57: note = Sequence encoding N-terminal nuclear localization signal (NLS)
  misc_feature 58..3114: note = Sequence encoding BhCas12b
  misc_feature 3115..3132: note = Sequence encoding a linker
  misc_feature 3133..3630: note = Sequence encoding TadA*8
  misc_feature 3631..3690: note = Sequence encoding Xten20 linker
  misc_feature 3691..3954: note = Sequence encoding BhCas12b
  misc_feature 3955..4002: note = Sequence encoding C-terminal NLS
  misc_feature 4003..4008: note = Sequence encoding GS linker
  misc_feature 4009..4089: note = Sequence encoding 3x hemagglutinin (HA) tag
  source 1..4092: mol_type = other DNA
gccaccatggccccaaagaagaagcggaaggtcggtatccacggagtcccagcagccgccaccagatccttcatcctgaagatcgagcccaacgaggaagtgaagaaaggcctctggaaaacccacgaggtgctgaaccacggaatcgcctactacatgaatatcctgaagctgatccggcaagaggccatctacgagcaccacgagcaggaccccaagaatcccaagaaggtgtccaaggccgagatccaggccgagctgtgggatttcgtgctgaagatgcagaagtgcaacagcttcacacacgaggtggacaaggacgaggtgttcaacatcctgagagagctgtacgaggaactggtgcccagcagcgtggaaaagaagggcgaagccaaccagctgagcaacaagtttctgtaccctctggtggaccccaacagccagtctggaaagggaacagccagcagcggcagaaagcccagatggtacaacctgaagattgccggcgatccctcctgggaagaagagaagaagaagtgggaagaagataagaaaaaggacccgctggccaagatcctgggcaagctggctgagtacggactgatccctctgttcatcccctacaccgacagcaacgagcccatcgtgaaagaaatcaagtggatggaaaagtcccggaaccagagcgtgcggcggctggataaggacatgttcattcaggccctggaacggttcctgagctgggagagctggaacctgaaagtgaaagaggaatacgagaaggtcgagaaagagtacaagaccctggaagagaggatcaaagaggacatccaggctctgaaggctctggaacagtatgagaaagagcggcaagaacagctgctgcgggacaccctgaacaccaacgagtaccggctgagcaagagaggccttagaggctggcgggaaatcatccagaaatggctgaaaatggacgagaacgagccctccgagaagtacctggaagtgttcaaggactaccagcggaagcaccctagagaggccggcgattacagcgtgtacgagttcctgtccaagaaagagaaccacttcatctggcggaatcaccctgagtacccctacctgtacgccaccttctgcgagatcgacaagaaaaagaaggacgccaagcagcaggccaccttcacactggccgatcctatcaatcaccctctgtgggtccgattcgaggaaagaagcggcagcaacctgaacaagtacagaatcctgaccgagcagctgcacaccgagaagctgaagaaaaagctgacagtgcagctggaccggctgatctaccctacagaatctggcggctgggaagagaagggcaaagtggacattgtgctgctgcccagccggcagttctacaaccagatcttcctggacatcgaggaaaagggcaagcacgccttcacctacaaggatgagagcatcaagttccctctgaagggcacactcggcggagccagagtgcagttcgacagagatcacctgagaagataccctcacaaggtggaaagcggcaacgtgggcagaatctacttcaacatgaccgtgaacatcgagcctacagagtccccagtgtccaagtctctgaagatccaccgggacgacttccccaaggtggtcaacttcaagcccaaagaactgaccgagtggatcaaggacagcaagggcaagaaactgaagtccggcatcgagtccctggaaatcggcctgagagtgatgagcatcgacctgggacagagacaggccgctgccgcctctattttcgaggtggtggatcagaagcccgacatcgaaggcaagctgtttttcccaatcaagggcaccgagctgtatgccgtgcacagagccagcttcaacatcaagctgcccggcgagacactggtcaagagcagagaagtgctgcggaaggccagagaggacaatctgaaactgatgaaccagaagctcaacttcctgcggaacgtgctgcacttccagcagttcgaggacatcaccgagagagagaagcgggtcaccaagtggatcagcagacaagagaacagcgacgtgcccctggtgtaccaggatgagctgatccagatccgcgagctgatgtacaagccttacaaggactgggtcgccttcctgaagcagctccacaagagactggaagtcgagatcggcaaagaagtgaagcactggcggaagtccctgagcgacggaagaaagggcctgtacggcatctccctgaagaacatcgacgagatcgatcggacccggaagttcctgctgagatggtccctgaggcctaccgaacctggcgaagtgcgtagactggaacccggccagagattcgccatcgaccagctgaatcacctgaacgccctgaaagaagatcggctgaagaagatggccaacaccatcatcatgcacgccctgggctactgctacgacgtgcggaagaagaaatggcaggctaagaaccccgcctgccagatcatcctgttcgaggatctgagcaactacaacccctacgaggaaaggtcccgcttcgagaacagcaagctcatgaagtggtccagacgcgagatccccagacaggttgcactgcagggcgagatctatggcctgcaagtgggagaagtgggcgctcagttcagcagcagattccacgccaagacaggcagccctggcatcagatgtagcgtcgtgaccaaagagaagctgcaggacaatcggttcttcaagaatctgcagagagagggcagactgaccctggacaaaatcgccgtgctgaaagagggcgatctgtacccagacaaaggcggcgagaagttcatcagcctgagcaaggatcggaagtgcgtgaccacacacgccgacatcaacgccgctcagaacctgcagaagcggttctggacaagaacccacggcttctacaaggtgtactgcaaggcctaccaggtggacggccagaccgtgtacatccctgagagcaaggaccagaagcagaagatcatcgaagagttcggcgagggctacttcattctgaaggacggggtgtacgaatgggtcaacgccggcaagggaggctctggaggaagctccgaagtcgagttttcccatgagtactggatgagacacgcattgactctcgcaaagagggctcgagatgaacgcgaggtgcccgtgggggcagtactcgtgctcaacaatcgcgtaatcggcgaaggttggaatagggcaatcggactccacgaccccactgcacatgcggaaatcatggcccttcgacagggagggcttgtgatgcagaattatcgactttatgatgcgacgctgtacgtcacgtttgaaccttgcgtaatgtgcgcgggagctatgattcactcccgcattggacgagttgtattcggtgttcgcaacgccaagacgggtgccgcaggttcactgatggacgtgctgcatcatccaggcatgaaccaccgggtagaaatcacagaaggcatattggcggacgaatgtgcggcgctgttgtgtcgtttttttcgcatgcccaggcgggtctttaacgcccagaaaaaagcacaatcctctactgacggctcttctggatctgaaacacctggcacaagcgagagcgccacccctgagagctctggcctgaaaatcaagaagggcagctccaagcagagcagcagcgagctggtggatagcgacatcctgaaagacagcttcgacctggcctccgagctgaaaggcgaaaagctgatgctgtacagggaccccagcggcaatgtgttccccagcgacaaatggatggccgctggcgtgttcttcggaaagctggaacgcatcctgatcagcaagctgaccaaccagtactccatcagcaccatcgaggacgacagcagcaagcagtctatgaaaaggccggcggccacgaaaaaggccggccaggcaaaaaagaaaaagggatcctacccatacgatgttccagattacgcttatccctacgacgtgcctgattatgcatacccatatgatgtccccgactatgcctaa

SEQ ID NO: 11 - protein, 1361 aa, synthetic construct
  REGION 1..1361: note = BhCas12b GGSGGS-ABE8-Xten20at K1019 polypeptide sequence
MAPKKKRKVGIHGVPAAATRSFILKIEPNEEVKKGLWKTHEVLNHGIAYYMNILKLIRQEAIYEHHEQDPKNPKKVSKAEIQAELWDFVLKMQKCNSFTHEVDKDEVFNILRELYEELVPSSVEKKGEANQLSNKFLYPLVDPNSQSGKGTASSGRKPRWYNLKIAGDPSWEEEKKKWEEDKKKDPLAKILGKLAEYGLIPLFIPYTDSNEPIVKEIKWMEKSRNQSVRRLDKDMFIQALERFLSWESWNLKVKEEYEKVEKEYKTLEERIKEDIQALKALEQYEKERQEQLLRDTLNTNEYRLSKRGLRGWREIIQKWLKMDENEPSEKYLEVFKDYQRKHPREAGDYSVYEFLSKKENHFIWRNHPEYPYLYATFCEIDKKKKDAKQQATFTLADPINHPLWVRFEERSGSNLNKYRILTEQLHTEKLKKKLTVQLDRLIYPTESGGWEEKGKVDIVLLPSRQFYNQIFLDIEEKGKHAFTYKDESIKFPLKGTLGGARVQFDRDHLRRYPHKVESGNVGRIYFNMTVNIEPTESPVSKSLKIHRDDFPKVVNFKPKELTEWIKDSKGKKLKSGIESLEIGLRVMSIDLGQRQAAAASIFEVVDQKPDIEGKLFFPIKGTELYAVHRASFNIKLPGETLVKSREVLRKAREDNLKLMNQKLNFLRNVLHFQQFEDITEREKRVTKWISRQENSDVPLVYQDELIQIRELMYKPYKDWVAFLKQLHKRLEVEIGKEVKHWRKSLSDGRKGLYGISLKNIDEIDRTRKFLLRWSLRPTEPGEVRRLEPGQRFAIDQLNHLNALKEDRLKKMANTIIMHALGYCYDVRKKKWQAKNPACQIILFEDLSNYNPYEERSRFENSKLMKWSRREIPRQVALQGEIYGLQVGEVGAQFSSRFHAKTGSPGIRCSVVTKEKLQDNRFFKNLQREGRLTLDKIAVLKEGDLYPDKGGEKFISLSKDRKCVTTHADINAAQNLQKRFWTRTHGFYKVYCKAYQVDGQTVYIPESKDQKQKIIEEFGEGYFILKDGVYEWVNAGKGGSGGSSEVEFSHEYWMRHALTLAKRARDEREVPVGAVLVLNNRVIGEGWNRAIGLHDPTAHAEIMALRQGGLVMQNYRLYDATLYVTFEPCVMCAGAMIHSRIGRVVFGVRNAKTGAAGSLMDVLHHPGMNHRVEITEGILADECAALLCRFFRMPRRVFNAQKKAQSSTDGSSGSETPGTSESATPESSGLKIKKGSSKQSSSELVDSDILKDSFDLASELKGEKLMLYRDPSGNVFPSDKWMAAGVFFGKLERILISKLTNQYSISTIEDDSSKQSMKRPAATKKAGQAKKKKGSYPYDVPDYAYPYDVPDYAYPYDVPDYA

SEQ ID NO: 12 - protein, 208 aa, Petromyzon marinus
  REGION 1..208: note = MISC_FEATURE - tr|A5H718|A5H718_PETMA Cytosine deaminase OS=Petromyzon marinusOX=7757 PE=2 SV=1 amino acid sequence; PmCDA1 polypeptide sequence
MTDAEYVRIHEKLDIYTFKKQFFNNKKSVSHRCYVLFELKRRGERRACFWGYAVNKPQSGTERGIHAEIFSIRKVEEYLRDNPGQFTINWYSSWSPCADCAEKILEWYNQELRGNGHTLKIWACKLYYEKNARNQIGLWNLRDNGVGLNVMVSEHYQCCRKIFIQSSHNQLNENRWLEKTLKRAEKRRSELSIMIQVKILHTTKSPAV

SEQ ID NO: 13 - DNA, 766 bp, Petromyzon marinus
  misc_feature 1..766: note = EF094822.1 Petromyzon marinus isolate PmCDA.21 cytosine deaminase mRNA, complete cds; PmCDA1 polynucleotide sequence
  source 1..766: mol_type = genomic DNA
tgacacgacacagccgtgtatatgaggaagggtagctggatggggggggggggaatacgttcagagaggacattagcgagcgtcttgttggtggccttgagtctagacacctgcagacatgaccgacgctgagtacgtgagaatccatgagaagttggacatctacacgtttaagaaacagtttttcaacaacaaaaaatccgtgtcgcatagatgctacgttctctttgaattaaaacgacggggtgaacgtagagcgtgtttttggggctatgctgtgaataaaccacagagcgggacagaacgtggaattcacgccgaaatctttagcattagaaaagtcgaagaatacctgcgcgacaaccccggacaattcacgataaattggtactcatcctggagtccttgtgcagattgcgctgaaaagatcttagaatggtataaccaggagctgcgggggaacggccacactttgaaaatctgggcttgcaaactctattacgagaaaaatgcgaggaatcaaattgggctgtggaacctcagagataacggggttgggttgaatgtaatggtaagtgaacactaccaatgttgcaggaaaatattcatccaatcgtcgcacaatcaattgaatgagaatagatggcttgagaagactttgaagcgagctgaaaaacgacggagcgagttgtccattatgattcaggtaaaaatactccacaccactaagagtcctgctgtttaagaggctatgcggatggttttc

SEQ ID NO: 14 - protein, 145 aa, Homo sapiens
  REGION 1..145: note = MISC_FEATURE - tr|Q6QJ80|Q6QJ80_HUMAN Activation-induced cytidine deaminase OS=Homo sapiens; OX = 9606 GN=AICDA PE=2 SV=1; AID polypeptide sequence
MDSLLMNRRKFLYQFKNVRWAKGRRETYLCYVVKRRDSATSFSLDFGYLRNKNGCHVELLFLRYISDWDLDPGRCYRVTWFTSWSPCYDCARHVADFLRGNPNLSLRIFTARLYFCEDRKAEPEGLRRLHRAGVQIAIMTFKAPV

SEQ ID NO: 15 - DNA, 10681 bp, Homo sapiens
  misc_feature 1..10681: note = NG_011588.1:5001-15681 Homo sapiens activation induced cytidine deaminase (AICDA), RefSeqGene (LRG_17) on chromosome 12; nucleic acid sequence of the CDS of human AID; polynucleotide sequence
  source 1..10681: mol_type = genomic DNA
agagaaccatcattaattgaagtgagatttttctggcctgagacttgcagggaggcaagaagacactctggacaccactatggacaggtaaagaggcagtcttctcgtgggtgattgcactggccttcctctcagagcaaatctgagtaatgagactggtagctatccctttctctcatgtaactgtctgactgataagatcagcttgatcaatatgcatatatattttttgatctgtctccttttcttctattcagatcttatacgctgtcagcccaattctttctgtttcagacttctcttgatttccctctttttcatgtggcaaaagaagtagtgcgtacaatgtactgattcgtcctgagatttgtaccatggttgaaactaatttatggtaataatattaacatagcaaatctttagagactcaaatcatgaaaaggtaatagcagtactgtactaaaaacggtagtgctaattttcgtaataattttgtaaatattcaacagtaaaacaacttgaagacacactttcctagggaggcgttactgaaataatttagctatagtaagaaaatttgtaattttagaaatgccaagcattctaaattaattgcttgaaagtcactatgattgtgtccattataaggagacaaattcattcaagcaagttatttaatgttaaaggcccaattgttaggcagttaatggcacttttactattaactaatctttccatttgttcagacgtagcttaacttacctcttaggtgtgaatttggttaaggtcctcataatgtctttatgtgcagtttttgataggttattgtcatagaacttattctattcctacatttatgattactatggatgtatgagaataacacctaatccttatactttacctcaatttaactcctttataaagaacttacattacagaataaagattttttaaaaatatatttttttgtagagacagggtcttagcccagccgaggctggtctctaagtcctggcccaagcgatcctcctgcctgggcctcctaaagtgctggaattatagacatgagccatcacatccaatatacagaataaagatttttaatggaggatttaatgttcttcagaaaattttcttgaggtcagacaatgtcaaatgtctcctcagtttacactgagattttgaaaacaagtctgagctataggtccttgtgaagggtccattggaaatacttgttcaaagtaaaatggaaagcaaaggtaaaatcagcagttgaaattcagagaaagacagaaaaggagaaaagatgaaattcaacaggacagaagggaaatatattatcattaaggaggacagtatctgtagagctcattagtgatggcaaaatgacttggtcaggattatttttaacccgcttgtttctggtttgcacggctggggatgcagctagggttctgcctcagggagcacagctgtccagagcagctgtcagcctgcaagcctgaaacactccctcggtaaagtccttcctactcaggacagaaatgacgagaacagggagctggaaacaggcccctaaccagagaagggaagtaatggatcaacaaagttaactagcaggtcaggatcacgcaattcatttcactctgactggtaacatgtgacagaaacagtgtaggcttattgtattttcatgtagagtaggacccaaaaatccacccaaagtcctttatctatgccacatccttcttatctatacttccaggacactttttcttccttatgataaggctctctctctctccacacacacacacacacacacacacacacacacacacacacacacaaacacacaccccgccaaccaaggtgcatgtaaaaagatgtagattcctctgcctttctcatctacacagcccaggagggtaagttaatataagagggatttattggtaagagatgatgcttaatctgtttaacactgggcctcaaagagagaatttcttttcttctgtacttattaagcacctattatgtgttgagcttatatatacaaagggttattatatgctaatatagtaatagtaatggtggttggtactatggtaattaccataaaaattattatccttttaaaataaagctaattattattggatcttttttagtattcattttatgttttttatgtttttgattttttaaaagacaatctcaccctgttacccaggctggagtgcagtggtgcaatcatagctttctgcagtcttgaactcctgggctcaagcaatcctcctgccttggcctcccaaagtgttgggatacagtcatgagccactgcatctggcctaggatccatttagattaaaatatgcattttaaattttaaaataatatggctaatttttaccttatgtaatgtgtatactggcaataaatctagtttgctgcctaaagtttaaagtgctttccagtaagcttcatgtacgtgaggggagacatttaaagtgaaacagacagccaggtgtggtggctcacgcctgtaatcccagcactctgggaggctgaggtgggtggatcgcttgagccctggagttcaagaccagcctgagcaacatggcaaaacgctgtttctataacaaaaattagccgggcatggtggcatgtgcctgtggtcccagctactagggggctgaggcaggagaatcgttggagcccaggaggtcaaggctgcactgagcagtgcttgcgccactgcactccagcctgggtgacaggaccagaccttgcctcaaaaaaataagaagaaaaattaaaaataaatggaaacaactacaaagagctgttgtcctagatgagctacttagttaggctgatattttggtatttaacttttaaagtcagggtctgtcacctgcactacattattaaaatatcaattctcaatgtatatccacacaaagactggtacgtgaatgttcatagtacctttattcacaaaaccccaaagtagagactatccaaatatccatcaacaagtgaacaaataaacaaaatgtgctatatccatgcaatggaataccaccctgcagtacaaagaagctacttggggatgaatcccaaagtcatgacgctaaatgaaagagtcagacatgaaggaggagataatgtatgccatacgaaattctagaaaatgaaagtaacttatagttacagaaagcaaatcagggcaggcatagaggctcacacctgtaatcccagcactttgagaggccacgtgggaagattgctagaactcaggagttcaagaccagcctgggcaacacagtgaaactccattctccacaaaaatgggaaaaaaagaaagcaaatcagtggttgtcctgtggggaggggaaggactgcaaagagggaagaagctctggtggggtgagggtggtgattcaggttctgtatcctgactgtggtagcagtttggggtgtttacatccaaaaatattcgtagaattatgcatcttaaatgggtggagtttactgtatgtaaattatacctcaatgtaagaaaaaataatgtgtaagaaaactttcaattctcttgccagcaaacgttattcaaattcctgagccctttacttcgcaaattctctgcacttctgccccgtaccattaggtgacagcactagctccacaaattggataaatgcatttctggaaaagactagggacaaaatccaggcatcacttgtgctttcatatcaaccatgctgtacagcttgtgttgctgtctgcagctgcaatggggactcttgatttctttaaggaaacttgggttaccagagtatttccacaaatgctattcaaattagtgcttatgatatgcaagacactgtgctaggagccagaaaacaaagaggaggagaaatcagtcattatgtgggaacaacatagcaagatatttagatcattttgactagttaaaaaagcagcagagtacaaaatcacacatgcaatcagtataatccaaatcatgtaaatatgtgcctgtagaaagactagaggaataaacacaagaatcttaacagtcattgtcattagacactaagtctaattattattattagacactatgatatttgagatttaaaaaatctttaatattttaaaatttagagctcttctatttttccatagtattcaagtttgacaatgatcaagtattactctttctttttttttttttttttttttttttgagatggagttttggtcttgttgcccatgctggagtggaatggcatgaccatagctcactgcaacctccacctcctgggttcaagcaaagctgtcgcctcagcctcccgggtagatgggattacaggcgcccaccaccacactcggctaatgtttgtatttttagtagagatggggtttcaccatgttggccaggctggtctcaaactcctgacctcagaggatccacctgcctcagcctcccaaagtgctgggattacagatgtaggccactgcgcccggccaagtattgctcttatacattaaaaaacaggtgtgagccactgcgcccagccaggtattgctcttatacattaaaaaataggccggtgcagtggctcacgcctgtaatcccagcactttgggaagccaaggcgggcagaacacccgaggtcaggagtccaaggccagcctggccaagatggtgaaaccccgtctctattaaaaatacaaacattacctgggcatgatggtgggcgcctgtaatcccagctactcaggaggctgaggcaggaggatccgcggagcctggcagatctgcctgagcctgggaggttgaggctacagtaagccaagatcatgccagtatacttcagcctgggcgacaaagtgagaccgtaacaaaaaaaaaaaaatttaaaaaaagaaatttagatcaagatccaactgtaaaaagtggcctaaacaccacattaaagagtttggagtttattctgcaggcagaagagaaccatcagggggtcttcagcatgggaatggcatggtgcacctggtttttgtgagatcatggtggtgacagtgtggggaatgttattttggagggactggaggcagacagaccggttaaaaggccagcacaacagataaggaggaagaagatgagggcttggaccgaagcagagaagagcaaacagggaaggtacaaattcaagaaatattggggggtttgaatcaacacatttagatgattaattaaatatgaggactgaggaataagaaatgagtcaaggatggttccaggctgctaggctgcttacctgaggtggcaaagtcgggaggagtggcagtttaggacagggggcagttgaggaatattgttttgatcattttgagtttgaggtacaagttggacacttaggtaaagactggaggggaaatctgaatatacaattatgggactgaggaacaagtttattttattttttgtttcgttttcttgttgaagaacaaatttaattgtaatcccaagtcatcagcatctagaagacagtggcaggaggtgactgtcttgtgggtaagggtttggggtccttgatgagtatctctcaattggccttaaatataagcaggaaaaggagtttatgatggattccaggctcagcagggctcaggagggctcaggcagccagcagaggaagtcagagcatcttctttggtttagcccaagtaatgacttccttaaaaagctgaaggaaaatccagagtgaccagattataaactgtactcttgcattttctctccctcctctcacccacagcctcttgatgaaccggaggaagtttctttaccaattcaaaaatgtccgctgggctaagggtcggcgtgagacctacctgtgctacgtagtgaagaggcgtgacagtgctacatccttttcactggactttggttatcttcgcaataaggtatcaattaaagtcggctttgcaagcagtttaatggtcaactgtgagtgcttttagagccacctgctgatggtattacttccatccttttttggcatttgtgtctctatcacattcctcaaatccttttttttatttctttttccatgtccatgcacccatattagacatggcccaaaatatgtgatttaattcctccccagtaatgctgggcaccctaataccactccttccttcagtgccaagaacaactgctcccaaactgtttaccagctttcctcagcatctgaattgcctttgagattaattaagctaaaagcatttttatatgggagaatattatcagcttgtccaagcaaaaattttaaatgtgaaaaacaaattgtgtcttaagcatttttgaaaattaaggaagaagaatttgggaaaaaattaacggtggctcaattctgtcttccaaatgatttcttttccctcctactcacatgggtcgtaggccagtgaatacattcaacatggtgatccccagaaaactcagagaagcctcggctgatgattaattaaattgatctttcggctacccgagagaattacatttccaagagacttcttcaccaaaatccagatgggtttacataaacttctgcccacgggtatctcctctctcctaacacgctgtgacgtctgggcttggtggaatctcagggaagcatccgtggggtggaaggtcatcgtctggctcgttgtttgatggttatattaccatgcaattttctttgcctacatttgtattgaatacatcccaatctccttcctattcggtgacatgacacattctatttcagaaggctttgattttatcaagcactttcatttacttctcatggcagtgcctattacttctcttacaatacccatctgtctgctttaccaaaatctatttccccttttcagatcctcccaaatggtcctcataaactgtcctgcctccacctagtggtccaggtatatttccacaatgttacatcaacaggcacttctagccattttccttctcaaaaggtgcaaaaagcaacttcataaacacaaattaaatcttcggtgaggtagtgtgatgctgcttcctcccaactcagcgcacttcgtcttcctcattccacaaaaacccatagccttccttcactctgcaggactagtgctgccaagggttcagctctacctactggtgtgctcttttgagcaagttgcttagcctctctgtaacacaaggacaatagctgcaagcatccccaaagatcattgcaggagacaatgactaaggctaccagagccgcaataaaagtcagtgaattttagcgtggtcctctctgtctctccagaacggctgccacgtggaattgctcttcctccgctacatctcggactgggacctagaccctggccgctgctaccgcgtcacctggttcacctcctggagcccctgctacgactgtgcccgacatgtggccgactttctgcgagggaaccccaacctcagtctgaggatcttcaccgcgcgcctctacttctgtgaggaccgcaaggctgagcccgaggggctgcggcggctgcaccgcgccggggtgcaaatagccatcatgaccttcaaaggtgcgaaagggccttccgcgcaggcgcagtgcagcagcccgcattcgggattgcgatgcggaatgaatgagttagtggggaagctcgaggggaagaagtgggcggggattctggttcacctctggagccgaaattaaagattagaagcagagaaaagagtgaatggctcagagacaaggccccgaggaaatgagaaaatggggccagggttgcttctttcccctcgatttggaacctgaactgtcttctacccccatatccccgcctttttttcctttttttttttttgaagattatttttactgctggaatacttttgtagaaaaccacgaaagaactttcaaagcctgggaagggctgcatgaaaattcagttcgtctctccagacagcttcggcgcatccttttggtaaggggcttcctcgctttttaaattttctttctttctctacagtcttttttggagtttcgtatatttcttatattttcttattgttcaatcactctcagttttcatctgatgaaaactttatttctcctccacatcagctttttcttctgctgtttcaccattcagagccctctgctaaggttccttttccctcccttttctttcttttgttgtttcacatctttaaatttctgtctctccccagggttgcgtttccttcctggtcagaattcttttctcctttttttttttttttttttttttttttaaacaaacaaacaaaaaacccaaaaaaactctttcccaatttactttcttccaacatgttacaaagccatccactcagtttagaagactctccggccccaccgacccccaacctcgttttgaagccattcactcaatttgcttctctctttctctacagcccctgtatgaggttgatgacttacgagacgcatttcgtactttgggactttgatagcaacttccaggaatgtcacacacgatgaaatatctctgctgaagacagtggataaaaaacagtccttcaagtcttctctgtttttattcttcaactctcactttcttagagtttacagaaaaaatatttatatacgactctttaaaaagatctatgtcttgaaaatagagaaggaacacaggtctggccagggacgtgctgcaattggtgcagttttgaatgcaacattgtcccctactgggaataacagaactgcaggacctgggagcatcctaaagtgtcaacgtttttctatgacttttaggtaggatgagagcagaaggtagatcctaaaaagcatggtgagaggatcaaatgtttttatatcaacatcctttattatttgattcatttgagttaacagtggtgttagtgatagatttttctattcttttcccttgacgtttactttcaagtaacacaaactcttccatcaggccatgatctataggacctcctaatgagagtatctgggtgattgtgaccccaaaccatctctccaaagcattaatatccaatcatgcgctgtatgttttaatcagcagaagcatgtttttatgtttgtacaaaagaagattgttatgggtggggatggaggtatagaccatgcatggtcaccttcaagctactttaataaaggatcttaaaatgggcaggaggactgtgaacaagacaccctaataatgggttgatgtctgaagtagcaaatcttctggaaacgcaaactcttttaaggaagtccctaatttagaaacacccacaaacttcacatatcataattagcaaacaattggaaggaagttgcttgaatgttggggagaggaaaatctattggctctcgtgggtctcttcatctcagaaatgccaatcaggtcaaggtttgctacattttgtatgtgtgtgatgcttctcccaaaggtatattaactatataagagagttgtgacaaaacagaatgataaagctgcgaaccgtggcacacgctcatagttctagctgcttgggaggttgaggagggaggatggcttgaacacaggtgttcaaggccagcctgggcaacataacaagatcctgtctctcaaaaaaaaaaaaaaaaaaaagaaagagagagggccgggcgtggtggctcacgcctgtaatcccagcactttgggaggccgagccgggcggatcacctgtggtcaggagtttgagaccagcctggccaacatggcaaaaccccgtctgtactcaaaatgcaaaaattagccaggcgtggtagcaggcacctgtaatcccagctacttgggaggctgaggcaggagaatcgcttgaacccaggaggtggaggttgcagtaagctgagatcgtgccgttgcactccagcctgggcgacaagagcaagactctgtctcagaaaaaaaaaaaaaaaagagagagagagagaaagagaacaatatttgggagagaaggatggggaagcattgcaaggaaattgtgctttatccaacaaaatgtaaggagccaataagggatccctatttgtctcttttggtgtctatttgtccctaacaactgtctttgacagtgagaaaaatattcagaataaccatatccctgtgccgttattacctagcaacccttgcaatgaagatgagcagatccacaggaaaacttgaatgcacaactgtcttattttaatcttattgtacataagtttgtaaaagagttaaaaattgttacttcatgtattcatttatattttatattattttgcgtctaatgattttttattaacatgatttccttttctgatatattgaaatggagtctcaaagcttcataaatttataactttagaaatgattctaataacaacgtatgtaattgtaacattgcagtaatggtgctacgaagccatttctcttgatttttagtaaacttttatgacagcaaatttgcttctggctcactttcaatcagttaaataaatgataaataattttggaagctgtgaagataaaataccaaataaaataatataaaagtgatttatatgaagttaaaataaaaaatcagtatgatggaataaacttg

SEQ ID NO: 16 - protein, 198 aa, Homo sapiens [sequence omitted]

SEQ ID NO: 17 - protein, 198 aa, Canis lupus
  REGION 1..198: note = MISC_FEATURE - Canine AID (clAID) polypeptide sequence
  REGION 1..30: note = MISC_FEATURE - Nuclear localization sequence
  REGION 183..198: note = MISC_FEATURE - Nuclear export signal
MDSLLMKQRKFLYHFKNVRWAKGRHETYLCYVVKRRDSATSFSLDFGHLRNKSGCHVELLFLRYISDWDLDPGRCYRVTWFTSWSPCYDCARHVADFLRGYPNLSLRIFAARLYFCEDRKAEPEGLRRLHRAGVQIAIMTFKDYFYCWNTFVENREKTFKAWEGLHENSVRLSRQLRRILLPLYEVDDLRDAFRTLGL

SEQ ID NO: 18 - protein, 199 aa, Bos taurus
  REGION 1..199: note = MISC_FEATURE - Bovine AID (btAID) polypeptide sequence
  REGION 1..30: note = MISC_FEATURE - Nuclear localization sequence
  REGION 183..199: note = MISC_FEATURE - Nuclear export signal
MDSLLKKQRQFLYQFKNVRWAKGRHETYLCYVVKRRDSPTSFSLDFGHLRNKAGCHVELLFLRYISDWDLDPGRCYRVTWFTSWSPCYDCARHVADFLRGYPNLSLRIFTARLYFCDKERKAEPEGLRRLHRAGVQIAIMTFKDYFYCWNTFVENHERTFKAWEGLHENSVRLSRQLRRILLPLYEVDDLRDAFRTLGL

SEQ ID NO: 19 - protein, 239 aa, Rattus sp.
  REGION 1..239: note = MISC_FEATURE - Rat AID polypeptide sequence
  REGION 1..26: note = MISC_FEATURE - Nuclear localization sequence
  REGION 194..239: note = MISC_FEATURE - Nuclear export signal
MAVGSKPKAALVGPHWERERIWCFLCSTGLGTQQTGQTSRWLRPAATQDPVSPPRSLLMKQRKFLYHFKNVRWAKGRHETYLCYVVKRRDSATSFSLDFGYLRNKSGCHVELLFLRYISDWDLDPGRCYRVTWFTSWSPCYDCARHVADFLRGNPNLSLRIFTARLTGWGALPAGLMSPARPSDYFYCWNTFVENHERTFKAWEGLHENSVRLSRRLRRILLPLYEVDDLRDAFRTLGL

SEQ ID NO: 20 - protein, 198 aa, Mus musculus [sequence omitted]

SEQ ID NO: 21 - protein, 229 aa, Rattus norvegicus [sequence omitted]

SEQ ID NO: 22 - protein, 229 aa, Mesocricetus auratus
  REGION 1..229: note = MISC_FEATURE - maAPOBEC-1 polypeptide sequence
MSSETGPVVVDPTLRRRIEPHEFDAFFDQGELRKETCLLYEIRWGGRHNIWRHTGQNTSRHVEINFIEKFTSERYFYPSTRCSIVWFLSWSPCGECSKAITEFLSGHPNVTLFIYAARLYHHTDQRNRQGLRDLISRGVTIRIMTEQEYCYCWRNFVNYPPSNEVYWPRYPNLWMRLYALELYCIHLGLPPCLKIKRRHQYPLTFFRLNLQSCHYQRIPPHILWATGFI

SEQ ID NO: 23 - protein, 236 aa, Pongo pygmaeus
  REGION 1..236: note = MISC_FEATURE - ppAPOBEC-1 polypeptide sequence
MTSEKGPSTGDPTLRRRIESWEFDVFYDPRELRKETCLLYEIKWGMSRKIWRSSGKNTTNHVEVNFIKKFTSERRFHSSISCSITWFLSWSPCWECSQAIREFLSQHPGVTLVIYVARLFWHMDQRNRQGLRDLVNSGVTIQIMRASEYYHCWRNFVNYPPGDEAHWPQYPPLWMMLYALELHCIILSLPPCLKISRRWQNHLAFFRLHLQNCHYQTIPPHILLATGLIHPSVTWR

SEQ ID NO: 24 - protein, 236 aa, Oryctolagus cuniculus
  REGION 1..236: note = MISC_FEATURE - ocAPOBEC1 polypeptide sequence
MASEKGPSNKDYTLRRRIEPWEFEVFFDPQELRKEACLLYEIKWGASSKTWRSSGKNTTNHVEVNFLEKLTSEGRLGPSTCCSITWFLSWSPCWECSMAIREFLSQHPGVTLIIFVARLFQHMDRRNRQGLKDLVTSGVTVRVMSVSEYCYCWENFVNYPPGKAAQWPRYPPRWMLMYALELYCIILGLPPCLKISRRHQKQLTFFSLTPQYCHYKMIPPYILLATGLLQPSVPWR

SEQ ID NO: 25 - protein, 235 aa, Monodelphis domestica
  REGION 1..235: note = MISC_FEATURE - mdAPOBEC-1 polypeptide sequence
MNSKTGPSVGDATLRRRIKPWEFVAFFNPQELRKETCLLYEIKWGNQNIWRHSNQNTSQHAEINFMEKFTAERHFNSSVRCSITWFLSWSPCWECSKAIRKFLDHYPNVTLAIFISRLYWHMDQQHRQGLKELVHSGVTIQIMSYSEYHYCWRNFVDYPQGEEDYWPKYPYLWIMLYVLELHCIILGLPPCLKISGSHSNQLALFSLDLQDCHYQKIPYNVLVATGLVQPFVTWR

SEQ ID NO: 26 - protein, 224 aa, Pongo pygmaeus
  REGION 1..224: note = MISC_FEATURE - ppAPOBEC-2 polypeptide sequence
MAQKEEAAAATEAASQNGEDLENLDDPEKLKELIELPPFEIVTGERLPANFFKFQFRNVEYSSGRNKTFLCYVVEAQGKGGQVQASRGYLEDEHAAAHAEEAFFNTILPAFDPALRYNVTWYVSSSPCAACADRIIKTLSKTKNLRLLILVGRLFMWEELEIQDALKKLKEAGCKLRIMKPQDFEYVWQNFVEQEEGESKAFQPWEDIQENFLYYEEKLADILK

SEQ ID NO: 27 - protein, 224 aa, Bos taurus
  REGION 1..224: note = MISC_FEATURE - btAPOBEC-2 polypeptide sequence
MAQKEEAAAAAEPASQNGEEVENLEDPEKLKELIELPPFEIVTGERLPAHYFKFQFRNVEYSSGRNKTFLCYVVEAQSKGGQVQASRGYLEDEHATNHAEEAFFNSIMPTFDPALRYMVTWYVSSSPCAACADRIVKTLNKTKNLRLLILVGRLFMWEEPEIQAALRKLKEAGCRLRIMKPQDFEYIWQNFVEQEEGESKAFEPWEDIQENFLYYEEKLADILK

SEQ ID NO: 28 - protein, 440 aa, Mus musculus
  REGION 1..440: note = MISC_FEATURE - mAPOBEC-3-(1) polypeptide sequence
MQPQRLGPRAGMGPFCLGCSHRKCYSPIRNLISQETFKFHFKNLGYAKGRKDTFLCYEVTRKDCDSPVSLHHGVFKNKDNIHAEICFLYWFHDKVLKVLSPREEFKITWYMSWSPCFECAEQIVRFLATHHNLSLDIFSSRLYNVQDPETQQNLCRLVQEGAQVAAMDLYEFKKCWKKFVDNGGRRFRPWKRLLTNFRYQDSKLQEILRPCYISVPSSSSSTLSNICLTKGLPETRFWVEGRRMDPLSEEEFYSQFYNQRVKHLCYYHRMKPYLCYQLEQFNGQAPLKGCLLSEKGKQHAEILFLDKIRSMELSQVTITCYLTWSPCPNCAWQLAAFKRDRPDLILHIYTSRLYFHWKRPFQKGLCSLWQSGILVDVMDLPQFTDCWTNFVNPKRPFWPWKGLEIISRRTQRRLRRIKESWGLQDLVNDFGNLQLGPPMS

SEQ ID NO: 29 - protein, 429 aa, Mus musculus
  REGION 1..429: note = MISC_FEATURE - APOBEC-3-(2) (Mouse APOBEC-3) polypeptide sequence
  REGION 71..108: note = MISC_FEATURE - Nucleic acid editing domain
  REGION 288..319: note = MISC_FEATURE - Nucleic acid editing domain
MGPFCLGCSHRKCYSPIRNLISQETFKFHFKNLGYAKGRKDTFLCYEVTRKDCDSPVSLHHGVFKNKDNIHAEICFLYWFHDKVLKVLSPREEFKITWYMSWSPCFECAEQIVRFLATHHNLSLDIFSSRLYNVQDPETQQNLCRLVQEGAQVAAMDLYEFKKCWKKFVDNGGRRFRPWKRLLTNFRYQDSKLQEILRPCYIPVPSSSSSTLSNICLTKGLPETRFCVEGRRMDPLSEEEFYSQFYNQRVKHLCYYHRMKPYLCYQLEQFNGQAPLKGCLLSEKGKQHAEILFLDKIRSMELSQVTITCYLTWSPCPNCAWQLAAFKRDRPDLILHIYTSRLYFHWKRPFQKGLCSLWQSGILVDVMDLPQFTDCWTNFVNPKRPFWPWKGLEIISRRTQRRLRRIKESWGLQDLVNDFGNLQLGPPMS

SEQ ID NO: 30 - protein, 430 aa, Rattus sp.
  REGION 1..430: note = MISC_FEATURE - APOBEC-3 polypeptide sequence
  REGION 72..109: note = MISC_FEATURE - Nucleic acid editing domain
  REGION 289..320: note = MISC_FEATURE - Nucleic acid editing domain
MGPFCLGCSHRKCYSPIRNLISQETFKFHFKNRLRYAIDRKDTFLCYEVTRKDCDSPVSLHHGVFKNKDNIHAEICFLYWFHDKVLKVLSPREEFKITWYMSWSPCFECAEQVLRFLATHHNLSLDIFSSRLYNIRDPENQQNLCRLVQEGAQVAAMDLYEFKKCWKKFVDNGGRRFRPWKKLLTNFRYQDSKLQEILRPCYIPVPSSSSSTLSNICLTKGLPETRFCVERRRVHLLSEEEFYSQFYNQRVKHLCYYHGVKPYLCYQLEQFNGQAPLKGCLLSEKGKQHAEILFLDKIRSMELSQVIITCYLTWSPCPNCAWQLAAFKRDRPDLILHIYTSRLYFHWKRPFQKGLCSLWQSGILVDVMDLPQFTDCWTNFVNPKRPFWPWKGLEIISRRTQRRLHRIKESWGLQDLVNDFGNLQLGPPMS

SEQ ID NO: 31 - protein, 199 aa, Homo sapiens
  REGION 1..199: note = MISC_FEATURE - hAPOBEC-3A polypeptide sequence
  REGION 70..106: note = MISC_FEATURE - Nucleic acid editing domain
MEASPASGPRHLMDPHIFTSNFNNGIGRHKTYLCYEVERLDNGTSVKMDQHRGFLHNQAKNLLCGFYGRHAELRFLDLVPSLQLDPAQIYRVTWFISWSPCFSWGCAGEVRAFLQENTHVRLRIFAARIYDYDPLYKEALQMLRDAGAQVSIMTYDEFKHCWDTFVDHQGCPFQPWDGLDEHSQALSGRLRAILQNQGN

SEQ ID NO: 32 - protein, 373 aa, Homo sapiens
  REGION 1..373: note = MISC_FEATURE - hAPOBEC-3F polypeptide sequence
  REGION 65..99: note = MISC_FEATURE - Nucleic acid editing domain
  REGION 248..283: note = MISC_FEATURE - Nucleic acid editing domain
MKPHFRNTVERMYRDTFSYNFYNRPILSRRNTVWLCYEVKTKGPSRPRLDAKIFRGQVYSQPEHHAEMCFLSWFCGNQLPAYKCFQITWFVSWTPCPDCVAKLAEFLAEHPNVTLTISAARLYYYWERDYRRALCRLSQAGARVKIMDDEEFAYCWENFVYSEGQPFMPWYKFDDNYAFLHRTLKEILRNPMEAMYPHIFYFHFKNLRKAYGRNESWLCFTMEVVKHHSPVSWKRGVFRNQVDPETHCHAERCFLSWFCDDILSPNTNYEVTWYTSWSPCPECAGEVAEFLARHSNVNLTIFTARLYYFWDTDYQEGLRSLSQEGASVEIMGYKDFKYCWENFVYNDDEPFKPWKGLKYNFLFLDSKLQEILE

SEQ ID NO: 33 - protein, 370 aa, Macaca mulatta
  REGION 1..370: note = MISC_FEATURE - Rhesus macaque APOBEC-3G polypeptide sequence
  REGION 1..61: note = MISC_FEATURE - Cytoplasmic localization signal
MVEPMDPRTFVSNFNNRPILSGLNTVWLCCEVKTKDPSGPPLDAKIFQGKVYSKAKYHPEMRFLRWFHKWRQLHHDQEYKVTWYVSWSPCTRCANSVATFLAKDPKVTLTIFVARLYYFWKPDYQQALRILCQKRGGPHATMKIMNYNEFQDCWNKFVDGRGKPFKPRNNLPKHYTLLQATLGELLRHLMDPGTFTSNFNNKPWVSGQHETYLCYKVERLHNDTWVPLNQHRGFLRNQAPNIHGFPKGRHAELCFLDLIPFWKLDGQQYRVTCFTSWSPCFSCAQEMAKFISNNEHVSLCIFAARIYDDQGRYQEGLRALHRDGAKIAMMNYSEFEYCWDTFVDRQGRPFQPWDGLDEHSQALSGRLRAI

SEQ ID NO: 34 - protein, 384 aa, Pan troglodytes
  REGION 1..384: note = MISC_FEATURE - Chimpanzee APOBEC-3G polypeptide sequence
  REGION 1..60: note = MISC_FEATURE - Cytoplasmic localization signal
  REGION 65..100: note = MISC_FEATURE - Nucleic acid editing domain
  REGION 257..291: note = MISC_FEATURE - Nucleic acid editing domain
MKPHFRNPVERMYQDTFSDNFYNRPILSHRNTVWLCYEVKTKGPSRPPLDAKIFRGQVYSKLKYHPEMRFFHWFSKWRKLHRDQEYEVTWYISWSPCTKCTRDVATFLAEDPKVTLTIFVARLYYFWDPDYQEALRSLCQKRDGPRATMKIMNYDEFQHCWSKFVYSQRELFEPWNNLPKYYILLHIMLGEILRHSMDPPTFTSNFNNELWVRGRHETYLCYEVERLHNDTWVLLNQRRGFLCNQAPHKHGFLEGRHAELCFLDVIPFWKLDLHQDYRVTCFTSWSPCFSCAQEMAKFISNNKHVSLCIFAARIYDDQGRCQEGLRTLAKAGAKISIMTYSEFKHCWDTFVDHQGCPFQPWDGLEEHSQALSGRLRAILQNQGN

SEQ ID NO: 35 - protein, 377 aa, Chlorocebus sabaeus
  REGION 1..377: note = MISC_FEATURE - Green monkey APOBEC-3G polypeptide sequence
  REGION 1..60: note = MISC_FEATURE - Cytoplasmic localization signal
  REGION 65..100: note = MISC_FEATURE - Nucleic acid editing domain
  REGION 257..290: note = MISC_FEATURE - Nucleic acid editing domain
MNPQIRNMVEQMEPDIFVYYFNNRPILSGRNTVWLCYEVKTKDPSGPPLDANIFQGKLYPEAKDHPEMKFLHWFRKWRQLHRDQEYEVTWYVSWSPCTRCANSVATFLAEDPKVTLTIFVARLYYFWKPDYQQALRILCQERGGPHATMKIMNYNEFQHCWNEFVDGQGKPFKPRKNLPKHYTLLHATLGELLRHVMDPGTFTSNFNNKPWVSGQRETYLCYKVERSHNDTWVLLNQHRGFLRNQAPDRHGFPKGRHAELCFLDLIPFWKLDDQQYRVTCFTSWSPCFSCAQKMAKFISNNKHVSLCIFAARIYDDQGRCQEGLRTLHRDGAKIAVMNYSEFEYCWDTFVDRQGRPFQPWDGLDEHSQALSGRLRAI

SEQ ID NO: 36 - protein, 384 aa, Homo sapiens
  REGION 1..384: note = MISC_FEATURE - Human APOBEC-3G polypeptide sequence
  REGION 1..60: note = MISC_FEATURE - Cytoplasmic localization signal
  REGION 65..100: note = MISC_FEATURE - Nucleic acid editing domain
  REGION 257..291: note = MISC_FEATURE - Nucleic acid editing domain
MKPHFRNTVERMYRDTFSYNFYNRPILSRRNTVWLCYEVKTKGPSRPPLDAKIFRGQVYSELKYHPEMRFFHWFSKWRKLHRDQEYEVTWYISWSPCTKCTRDMATFLAEDPKVTLTIFVARLYYFWDPDYQEALRSLCQKRDGPRATMKIMNYDEFQHCWSKFVYSQRELFEPWNNLPKYYILLHIMLGEILRHSMDPPTFTFNFNNEPWVRGRHETYLCYEVERMHNDTWVLLNQRRGFLCNQAPHKHGFLEGRHAELCFLDVIPFWKLDLDQDYRVTCFTSWSPCFSCAQEMAKFISKNKHVSLCIFTARIYDDQGRCQEGLRTLAEAGAKISIMTYSEFKHCWDTFVDHQGCPFQPWDGLDEHSQDLSGRLRAILQNQEN

SEQ ID NO: 37 - protein, 382 aa, Homo sapiens
  REGION 1..382: note = MISC_FEATURE - Human APOBEC-3B polypeptide sequence
  REGION 66..100: note = MISC_FEATURE - Nucleic acid editing domain
  REGION 251..289: note = MISC_FEATURE - Nucleic acid editing domain
MNPQIRNPMERMYRDTFYDNFENEPILYGRSYTWLCYEVKIKRGRSNLLWDTGVFRGQVYFKPQYHAEMCFLSWFCGNQLPAYKCFQITWFVSWTPCPDCVAKLAEFLSEHPNVTLTISAARLYYYWERDYRRALCRLSQAGARVTIMDYEEFAYCWENFVYNEGQQFMPWYKFDENYAFLHRTLKEILRYLMDPDTFTFNFNNDPLVLRRRQTYLCYEVERLDNGTWVLMDQHMGFLCNEAKNLLCGFYGRHAELRFLDLVPSLQLDPAQIYRVTWFISWSPCFSWGCAGEVRAFLQENTHVRLRIFAARIYDYDPLYKEALQMLRDAGAQVSIMTYDEFEYCWDTFVYRQGCPFQPWDGLEEHSQALSGRLRAILQNQGN

SEQ ID NO: 38 - protein, 395 aa, Rattus sp.
  REGION 1..395: note = MISC_FEATURE - Rat APOBEC-3B polypeptide sequence
MQPQGLGPNAGMGPVCLGCSHRRPYSPIRNPLKKLYQQTFYFHFKNVRYAWGRKNNFLCYEVNGMDCALPVPLRQGVFRKQGHIHAELCFIYWFHDKVLRVLSPMEEFKVTWYMSWSPCSKCAEQVARFLAAHRNLSLAIFSSRLYYYLRNPNYQQKLCRLIQEGVHVAAMDLPEFKKCWNKFVDNDGQPFRPWMRLRINFSFYDCKLQEIFSRMNLLREDVFYLQFNNSHRVKPVQNRYYRRKSYLCYQLERANGQEPLKGYLLYKKGEQHVEILFLEKMRSMELSQVRITCYLTWSPCPNCARQLAAFKKDHPDLILRIYTSRLYFWRKKFQKGLCTLWRSGIHVDVMDLPQFADCWTNFVNPQRPFRPWNELEKNSWRIQRRLRRIKESWGL

SEQ ID NO: 39 - protein, 226 aa, Bos taurus
  REGION 1..226: note = MISC_FEATURE - Bovine APOBEC-3B polypeptide sequence
DGWEVAFRSGTVLKAGVLGVSMTEGWAGSGHPGQGACVWTPGTRNTMNLLREVLFKQQFGNQPRVPAPYYRRKTYLCYQLKQRNDLTLDRGCFRNKKQRHAERFIDKINSLDLNPSQSYKIICYITWSPCPNCANELVNFITRNNHLKLEIFASRLYFHWIKSFKMGLQDLQNAGISVAVMTHTEFEDCWEQFVDNQSRPFQPWDKLEQYSASIRRRLQRILTAPI

SEQ ID NO: 40 - protein, 490 aa, Pan troglodytes
  REGION 1..490: note = MISC_FEATURE - Chimpanzee APOBEC-3B polypeptide sequence
MNPQIRNPMEWMYQRTFYYNFENEPILYGRSYTWLCYEVKIRRGHSNLLWDTGVFRGQMYSQPEHHAEMCFLSWFCGNQLSAYKCFQITWFVSWTPCPDCVAKLAKFLAEHPNVTLTISAARLYYYWERDYRRALCRLSQAGARVKIMDDEEFAYCWENFVYNEGQPFMPWYKFDDNYAFLHRTLKEIIRHLMDPDTFTFNFNNDPLVLRRHQTYLCYEVERLDNGTWVLMDQHMGFLCNEAKNLLCGFYGRHAELRFLDLVPSLQLDPAQIYRVTWFISWSPCFSWGCAGQVRAFLQENTHVRLRIFAARIYDYDPLYKEALQMLRDAGAQVSIMTYDEFEYCWDTFVYRQGCPFQPWDGLEEHSQALSGRLRAILQVRASSLCMVPHRPPPPPQSPGPCLPLCSEPPLGSLLPTGRPAPSLPFLLTASFSFPPPASLPPLPSLSLSPGHLPVPSFHSLTSCSIQPPCSSRIRETEGWASVSKEGRDLG

SEQ ID NO: 41 - protein, 190 aa, Homo sapiens
  REGION 1..190: note = MISC_FEATURE - Human APOBEC-3C polypeptide sequence
  REGION 65..100: note = MISC_FEATURE - Nucleic acid editing domain
MNPQIRNPMKAMYPGTFYFQFKNLWEANDRNETWLCFTVEGIKRRSVVSWKTGVFRNQVDSETHCHAERCFLSWFCDDILSPNTKYQVTWYTSWSPCPDCAGEVAEFLARHSNVNLTIFTARLYYFQYPCYQEGLRSLSQEGVAVEIMDYEDFKYCWENFVYNDNEPFKPWKGLKTNFRLLKRRLRESLQ

SEQ ID NO: 42 - protein, 190 aa, Gorilla sp.
  REGION 1..190: note = MISC_FEATURE - Gorilla APOBEC-3C polypeptide sequence
  REGION 65..100: note = MISC_FEATURE - Nucleic acid editing domain
MNPQIRNPMKAMYPGTFYFQFKNLWEANDRNETWLCFTVEGIKRRSVVSWKTGVFRNQVDSETHCHAERCFLSWECDDILSPNTNYQVTWYTSWSPCPECAGEVAEFLARHSNVNLTIFTARLYYFQDTDYQEGLRSLSQEGVAVKIMDYKDFKYCWENFVYNDDEPFKPWKGLKYNFRFLKRRLQEILE

SEQ ID NO: 43 - protein, 202 aa, Macaca mulatta
  REGION 1..202: note = MISC_FEATURE - Rhesus macaque APOBEC-3A polypeptide sequence
  REGION 72..103: note = MISC_FEATURE - Nucleic acid editing domain
MDGSPASRPRHLMDPNTFTFNFNNDLSVRGRHQTYLCYEVERLDNGTWVPMDERRGFLCNKAKNVPCGDYGCHVELRFLCEVPSWQLDPAQTYRVTWFISWSPCFRRGCAGQVRVFLQENKHVRLRIFAARIYDYDPLYQEALRTLRDAGAQVSIMTYEEFKHCWDTFVDRQGRPFQPWDGLDEHSQALSGRLRAILQNQGN

SEQ ID NO: 44 - protein, 185 aa, Bos taurus
  REGION 1..185: note = MISC_FEATURE - Bovine APOBEC-3A polypeptide sequence
  REGION 56..86: note = MISC_FEATURE - Nucleic acid editing domain
MDEYTFTENFNNQGWPSKTYLCYEMERLDGDATIPLDEYKGFVRNKGLDQPEKPCHAELYFLGKIHSWNLDRNQHYRLTCFISWSPCYDCAQKLTTFLKENHHISLHILASRIYTHNRFGCHQSGLCELQAAGARITIMTFEDFKHCWETFVDHKGKPFQPWEGLNVKSQALCTELQAILKTQQN

SEQ ID NO: 45 - protein, 200 aa, Homo sapiens
  REGION 1..200: note = MISC_FEATURE - Human APOBEC-3H polypeptide sequence
  REGION 54..88: note = MISC_FEATURE - Nucleic acid editing domain
MALLTAETFRLQFNNKRRLRRPYYPRKALLCYQLTPQNGSTPTRGYFENKKKCHAEICFINEIKSMGLDETQCYQVTCYLTWSPCSSCAWELVDFIKAHDHLNLGIFASRLYYHWCKPQQKGLRLLCGSQVPVEVMGFPKFADCWENFVDHEKPLSFNPYKMLEELDKNSRAIKRRLERIKIPGVRAQGRYMDILCDAEV

SEQ ID NO: 46 - protein, 210 aa, Macaca mulatta
  REGION 1..210: note = MISC_FEATURE - Rhesus macaque APOBEC-3H polypeptide sequence
MALLTAKTFSLQFNNKRRVNKPYYPRKALLCYQLTPQNGSTPTRGHLKNKKKDHAEIRFINKIKSMGLDETQCYQVTCYLTWSPCPSCAGELVDFIKAHRHLNLRIFASRLYYHWRPNYQEGLLLLCGSQVPVEVMGLPEFTDCWENFVDHKEPPSFNPSEKLEELDKNSQAIKRRLERIKSRSVDVLENGLRSLQLGPVTPSSSIRNSR

SEQ ID NO: 47 - protein, 386 aa, Homo sapiens
  REGION 1..386: note = MISC_FEATURE - Human APOBEC-3D polypeptide sequence
  REGION 78..109: note = MISC_FEATURE - Nucleic acid editing domain
  REGION 262..296: note = MISC_FEATURE - Nucleic acid editing domain
MNPQIRNPMERMYRDTFYDNFENEPILYGRSYTWLCYEVKIKRGRSNLLWDTGVFRGPVLPKRQSNHRQEVYFRFENHAEMCFLSWFCGNRLPANRRFQITWFVSWNPCLPCVVKVTKFLAEHPNVTLTISAARLYYYRDRDWRWVLLRLHKAGARVKIMDYEDFAYCWENFVCNEGQPFMPWYKFDDNYASLHRTLKEILRNPMEAMYPHIFYFHFKNLLKACGRNESWLCFTMEVTKHHSAVFRKRGVFRNQVDPETHCHAERCFLSWFCDDILSPNTNYEVTWYTSWSPCPECAGEVAEFLARHSNVNLTIFTARLCYFWDTDYQEGLCSLSQEGASVKIMGYKDFVSCWKNFVYSDDEPFKPWKGLQTNFRLLKRRLREILQ

SEQ ID NO: 48 - protein, 236 aa, Homo sapiens
  REGION 1..236: note = MISC_FEATURE - Human APOBEC-1 polypeptide sequence
MTSEKGPSTGDPTLRRRIEPWEFDVFYDPRELRKEACLLYEIKWGMSRKIWRSSGKNTTNHVEVNFIKKFTSERDFHPSMSCSITWFLSWSPCWECSQAIREFLSRHPGVTLVIYVARLFWHMDQQNRQGLRDLVNSGVTIQIMRASEYYHCWRNFVNYPPGDEAHWPQYPPLWMMLYALELHCIILSLPPCLKISRRWQNHLTFFRLHLQNCHYQTIPPHILLATGLIHPSVAWR

SEQ ID NO: 49 - protein, 229 aa, Mus musculus
  REGION 1..229: note = MISC_FEATURE - Mouse APOBEC-1 polypeptide sequence
MSSETGPVAVDPTLRRRIEPHEFEVFFDPRELRKETCLLYEINWGGRHSVWRHTSQNTSNHVEVNFLEKFTTERYFRPNTRCSITWFLSWSPCGECSRAITEFLSRHPYVTLFIYIARLYHHTDQRNRQGLRDLISSGVTIQIMTEQEYCYCWRNFVNYPPSNEAYWPRYPHLWVKLYVLELYCIILGLPPCLKILRRKQPQLTFFTITLQTCHYQRIPPHLLWATGLK

SEQ ID NO: 50 - protein, 224 aa, Homo sapiens
  REGION 1..224: note = MISC_FEATURE - Human APOBEC-2 polypeptide sequence
MAQKEEAAVATEAASQNGEDLENLDDPEKLKELIELPPFEIVTGERLPANFFKFQFRNVEYSSGRNKTFLCYVVEAQGKGGQVQASRGYLEDEHAAAHAEEAFFNTILPAFDPALRYNVTWYVSSSPCAACADRIIKTLSKTKNLRLLILVGRLFMWEEPEIQAALKKLKEAGCKLRIMKPQDFEYVWQNFVEQEEGESKAFQPWEDIQENFLYYEEKLADILK

SEQ ID NO: 51 - protein, 224 aa, Mus musculus
  REGION 1..224: note = MISC_FEATURE - Mouse APOBEC-2 polypeptide sequence
MAQKEEAAEAAAPASQNGDDLENLEDPEKLKELIDLPPFEIVTGVRLPVNFFKFQFRNVEYSSGRNKTFLCYVVEVQSKGGQAQATQGYLEDEHAGAHAEEAFFNTILPAFDPALKYNVTWYVSSSPCAACADRILKTLSKTKNLRLLILVSRLFMWEEPEVQAALKKLKEAGCKLRIMKPQDFEYIWQNFVEQEEGESKAFEPWEDIQENFLYYEEKLADILK

SEQ ID NO: 52 - protein, 224 aa, Rattus sp.
  REGION 1..224: note = MISC_FEATURE - Rat APOBEC-2 polypeptide sequence
MAQKEEAAEAAAPASQNGDDLENLEDPEKLKELIDLPPFEIVTGVRLPVNFFKFQFRNVEYSSGRNKTFLCYVVEAQSKGGQVQATQGYLEDEHAGAHAEEAFFNTILPAFDPALKYNVTWYVSSSPCAACADRILKTLSKTKNLRLLILVSRLFMWEEPEVQAALKKLKEAGCKLRIMKPQDFEYLWQNFVEQEEGESKAFEPWEDIQENFLYYEEKLADILK

SEQ ID NO: 53 - protein, 208 aa, Petromyzon marinus
  REGION 1..208: note = MISC_FEATURE - Petromyzon marinus CDA1 (pmCDAl) polypeptide sequence
MTDAEYVRIHEKLDIYTFKKQFFNNKKSVSHRCYVLFELKRRGERRACFWGYAVNKPQSGTERGIHAEIFSIRKVEEYLRDNPGQFTINWYSSWSPCADCAEKILEWYNQELRGNGHTLKIWACKLYYEKNARNQIGLWNLRDNGVGLNVMVSEHYQCCRKIFIQSSHNQLNENRWLEKTLKRAEKRRSELSFMIQVKILHTTKSPAV

SEQ ID NO: 54 - protein, 381 aa, Homo sapiens
  REGION 1..381: note = MISC_FEATURE - Human APOBEC3G D316R D317R polypeptide sequence
MKPHFRNTVERMYRDTFSYNFYNRPILSRRNTVWLCYEVKTKGPSRPPLDAKIFRGQVYSELKYHPEMRFFHWFSKWRKLHRDQEYEVTWYISWSPCTKCTRDMATFLAEDPKVTLTIFVARLYYFWDPDYQEALRSLCQKRDGPRATMKFNYDEFQHCWSKFVYSQRELFEPWNNLPKYYILLHFMLGEILRHSMDPPTFTFNFNNEPWVRGRHETYLCYEVERMHNDTWVLLNQRRGFLCNQAPHKHGFLEGRHAELCFLDVIPFWKLDLDQDYRVTCFTSWSPCFSCAQEMAKFISKKHVSLCIFTARIYRRQGRCQEGLRTLAEAGAKISFTYSEFKHCWDTFVDHQGCPFQPWDGLDEHSQDLSGRLRAILQNQEN

SEQ ID NO: 55 - protein, 182 aa, Homo sapiens
  REGION 1..182: note = MISC_FEATURE - Human APOBEC3G chain A polypeptide sequence
MDPPTFTFNFNNEPWWGRHETYLCYEVERMHNDTWVLLNQRRGFLCNQAPHKHGFLEGRHAELCFLDVIPFWKLDLDQDYRVTCFTSWSPCFSCAQEMAKFISKNKHVSLCIFTARIYDDQGRCQEGLRTLAEAGAKISFTYSEFKHCWDTFVDHQGCPFQPWDGLDEHSQDLSGRLRAILQ

SEQ ID NO: 56 - protein, 184 aa, Homo sapiens
  REGION 1..184: note = MISC_FEATURE - Human APOBEC3G chain A D120R D121R polypeptide sequence
MDPPTFTFNFNNEPWVRGRHETYLCYEVERMHNDTWVLLNQRRGFLCNQAPHKHGFLEGRHAELCFLDVIPFWKLDLDQDYRVTCFTSWSPCFSCAQEMAKFISKNKHVSLCIFTARIYRRQGRCQEGLRTLAEAGAKISFMTYSEFKHCWDTFVDHQGCPFQPWDGLDEHSQDLSGRLRAILQ

SEQ ID NO: 57 - protein, 367 aa, Homo sapiens
  REGION 1..367: note = MISC_FEATURE - hAPOBEC-4 polypeptide sequence
MEPIYEEYLANHGTIVKPYYWLSFSLDCSNCPYHIRTGEEARVSLTEFCQIFGFPYGTTFPQTKHLTFYELKTSSGSLVQKGHASSCTGNYIHPESMLFEMNGYLDSAIYNNDSIRHIILYSNNSPCNEANHCCISKMYNFLITYPGITLSIYFSQLYHTEMDFPASAWNREALRSLASLWPRVVLSPISGGIWHSVLHSFISGVSGSHVFQPILTGRALADRHNAYEINAITGVKPYFTDVLLQTKRNPNTKAQEALESYPLNNAFPGQFFQMPSGQLQPNLPPDLRAPVVFVLVPLRDLPPMHMGQNPNKPRNIVRHLNMPQMSFQETKDLGRLPTGRSVEIVEITEQFASSKEADEKKKKKGKK

SEQ ID NO: 58 - protein, 388 aa, Rattus norvegicus
  REGION 1..388: note = MISC_FEATURE - rAPOBEC-4 polypeptide sequence
MEPLYEEYLTHSGTIVKPYYWLSVSLNCTNCPYHIRTGEEARVPYTEFHQTFGFPWSTYPQTKHLTFYELRSSSGNLIQKGLASNCTGSHTHPESMLFERDGYLDSLIFHDSNIRHIILYSNNSPCDEANHCCISKMYNFLMNYPEVTLSVFFSQLYHTENQFPTSAWNREALRGLASLWPQVTLSAISGGIWQSILETFVSGISEGLTAVRPFTAGRTLTDRYNAYEINCITEVKPYFTDALHSWQKENQDQKVWAASENQPLHNTTPAQWQPDMSQDCRTPAVFMLVPYRDLPPIHVNPSPQKPRTVVRHLNTLQLSASKVKALRKSPSGRPVKKEEARKGSTRSQEANETNKSKWKKQTLFIKSNICHLLEREQKKIGILSSWSV

SEQ ID NO: 59 - protein, 363 aa, Macaca fascicularis
  REGION 1..363: note = MISC_FEATURE - mfAPOBEC-4 polypeptide sequence
MEPTYEEYLANHGTIVKPYYWLSFSLDCSNCPYHIRTGEEARVSLTEFCQIFGFPYGTTYPQTKHLTFYELKTSSGSLVQKGHASSCTGNYIHPESMLFEMNGYLDSAIYNNDSIRHIILYCNNSPCNEANHCCISKVYNFLITYPGITLSIYFSQLYHTEMDFPASAWNREALRSLASLWPRVVLSPISGGIWHSVLHSFVSGVSGSHVFQPILTGRALTDRYNAYEINAITGVKPFFTDVLLHTKRNPNTKAQMALESYPLNNAFPGQSFQMTSGIPPDLRAPVVFVLLPLRDLPPMHMGQDPNKPRNIIRHLNMPQMSFQETKDLERLPTRRSVETVEITERFASSKQAEEKTKKKKGKK

SEQ ID NO: 60 - protein, 218 aa, Rattus norvegicus
  REGION 1..218: note = MISC_FEATURE - rAPOBEC-1 (delta 177-186) polypeptide sequence
MSSETGPVAVDPTLRRRIEPHEFEVFFDPRELRKETCLLYEINWGGRHSIWRHTSQNTNKHVEVNFIEKFTTERYFCPNTRCSITWFLSWSPCGECSRAITEFLSRYPHVTLFIYIARLYHHADPRNRQGLRDLISSGVTIQIMTEQESGYCWRNFVNYSPSNEAHWPRYPHLWVRGLPPCLNILRRKQPQLTFFTIALQSCHYQRLPPHILWATGLK

SEQ ID NO: 61 - protein, 218 aa, Rattus norvegicus
  REGION 1..218: note = MISC_FEATURE - rAPOBEC-1 (delta 202-213) polypeptide sequence
MSSETGPVAVDPTLRRRIEPHEFEVFFDPRELRKETCLLYEINWGGRHSIWRHTSQNTNKHVEVNFIEKFTTERYFCPNTRCSITWFLSWSPCGECSRAITEFLSRYPHVTLFIYIARLYHHADPRNRQGLRDLISSGVTIQIMTEQESGYCWRNFVNYSPSNEAHWPRYPHLWVRLYVLELYCIILGLPPCLNILRRKQPQHYQRLPPHILWATGLK

SEQ ID NO: 62 - protein, 198 aa, Mus musculus
  REGION 1..198: note = MISC_FEATURE - mouse cytidine deaminase polypeptide sequence
  REGION 1..30: note = MISC_FEATURE - Nuclear localization sequence
  REGION 183..198: note = MISC_FEATURE - Nuclear export signal
MDSLLMKQKKFLYHFKNVRWAKGRHETYLCYVVKRRDSATSCSLDFGHLRNKSGCHVELLFLRYISDWDLDPGRCYRVTWFTSWSPCYDCARHVAEFLRWNPNLSLRIFTARLYFCEDRKAEPEGLRRLHRAGVQIGIMTFKDYFYCWNTFVENRERTFKAWEGLHENSVRLTRQLRRILLPLYEVDDLRDAFRMLGF

SEQ ID NO: 63 - protein, 224 aa, Petromyzon marinus
  REGION 1..224: note = MISC_FEATURE - pmCDA-1 polypeptide sequence
MAGYECVRVSEKLDFDTFEFQFENLHYATERHRTYVIFDVKPQSAGGRSRRLWGYIINNPNVCHAELILMSMIDRHLESNPGVYAMTWYMSWSPCANCSSKLNPWLKNLLEEQGHTLTMHFSRIYDRDREGDHRGLRGLKHVSNSFRMGVVGRAEVKECLAEYVEASRRTLTWLDTTESMAAKMRRKLFCILVRCAGMRESGIPLHLFTLQTPLLSGRVVWWRV

SEQ ID NO: 64 - protein, 331 aa, Petromyzon marinus
  REGION 1..331: note = MISC_FEATURE - pmCDA-2 polypeptide sequence
MELREVVDCALASCVRHEPLSRVAFLRCFAAPSQKPRGTVILFYVEGAGRGVTGGHAVNYNKQGTSIHAEVLLLSAVRAALLRRRRCEDGEEATRGCTLHCYSTYSPCRDCVEYIQEFGASTGVRVVIHCCRLYELDVNRRRSEAEGVLRSLSRLGRDFRLMGPRDAIALLLGGRLANTADGESGASGNAWVTETNVVEPLVDMTGFGDEDLHAQVQRNKQIREAYANYASAVSLMLGELHVDPDKFPFLAEFLAQTSVEPSGTPRETRGRPRGASSRGPEIGRQRPADFERALGAYGLFLHPRIVSREADREEIKRDLIVVMRKHNYQGP

SEQ ID NO: 65 - protein, 209 aa, Petromyzon marinus
  REGION 1..209: note = MISC_FEATURE - pmCDA-5 polypeptide sequence
MAGDENVRVSEKLDFDTFEFQFENLHYATERHRTYVIFDVKPQSAGGRSRRLWGYIINNPNVCHAELILMSMIDRHLESNPGVYAMTWYMSWSPCANCSSKLNPWLKNLLEEQGHTLMMHFSRIYDRDREGDHRGLRGLKHVSNSFRMGVVGRAEVKECLAEYVEASRRTLTWLDTTESMAAKMRRKLFCILVRCAGMRESGMPLHLFT

SEQ ID NO: 66 - protein, 158 aa, Saccharomyces cerevisiae
  REGION 1..158: note = MISC_FEATURE - yCD polypeptide sequence
MVTGGMASKWDQKGMDIAYEEAALGYKEGGVPIGGCLINNKDGSVLGRGHNMRFQKGSATLHGEISTLENCGRLEGKVYKDTTLYTTLSPCDMCTGAIIMYGIPRCVVGENVNFKSKGEKYLQTRGHEVVVVDDERCKKIMKQFIDERPQDWFEDIGE

SEQ ID NO: 67 - protein, 194 aa, synthetic construct
  REGION 1..194: note = cytidine deaminase polypeptide sequence
MKPQIRDHRPNPMEAMYPHIFYFHFENLEKAYGRNETWLCFTVEIIKQYLPVPWKKGVFRNQVDPETHCHAEKCFLSWFCNNTLSPKKNYQVTWYTSWSPCPECAGEVAEFLAEHSNVKLTIYTARLYYFWDTDYQEGLRSLSEEGASVEIMDYEDFQYCWENFVYDDGEPFKRWKGLKYNFQSLTRRLREILQ

SEQ ID NO: 68 - protein, 192 aa, synthetic construct
  REGION 1..192: note = cytidine deaminase polypeptide sequence
MADSSEKMRGQYISRDTFEKNYKPIDGTKEAHLLCEIKWGKYGKPWLHWCQNQRMNIHAEDYFMNNIFKAKKHPVHCYVTWYLSWSPCADCASKIVKFLEERPYLKLTIYVAQLYYHTEEENRKGLRLLRSKKVIIRVMDISDYNYCWKVFVSNQNGNEDYWPLQFDPWVKENYSRLLDIFWESKCRSPNPW

SEQ ID NO: 69 - protein, 280 aa, synthetic construct
  REGION 1..280: note = cytidine deaminase polypeptide sequence
MDPQRLRQWPGPGPASRGGYGQRPRIRNPEEWFHELSPRTFSFHFRNLRFASGRNRSYICCQVEGKNCFFQGIFQNQVPPDPPCHAELCFLSWFQSWGLSPDEHYYVTWFISWSPCCECAAKVAQFLEENRNVSLSLSAARLYYFWKSESREGLRRLSDLGAQVGIMSFQDFQHCWNNFVHNLGMPFQPWKKLHKNYQRLVTELKQILREEPATYGSPQAQGKVRIGSTAAGLRHSHSHTRSEAHLRPNHSSRQHRILNPPREARARTCVLVDASWICYR

SEQ ID NO: 70 - protein, 555 aa, synthetic construct
  REGION 1..555: note = pYY-BEM3.1; tr|F7B644|F7B644_HORSE polypeptide sequence
MPRGRARERQRRNPMEKLDAEAFSFHFLNMEFVYDRNCSYLCYQVEGRLSGSPVLSEQGVFPNEVCGKTRRHAELCFLDWFRGRLSPDEYYCVTWFISWSPCSNCAREVAEFLKRHRNVELSIFAARLYYCRDHEQGLQSLCNRGAQLAVMLRKDFTYCWDNFVHNSGREFSPWENIDANSDLLARKLEDLLKNPMEKLHRKTFSFHFRNLKFAKGRKCSYLCYRVEGRLSGSPGLSEQGVFLNEVCDENCRHAELCFLHWFRGRLSPHADYRVTWFISWSPCSNCAREVAEFLKQHRNVELHISAARLYYWQRNKPGLRNLRSSGAQLAIMFFWDFRDCWDNFVHNSGRHFIPWKKINVNSRLLATKLEDLLKNPLEKLHPNTFSFHFCNLEFAYDRKYSYLCYQVEGRLSGSPGLSEQGVFLNEVCGKTRCHAELCFLDWFRVRLSPDEYYRVTWFISWSPCFYCAREVADFLKQYRNVKLSIFAARLYYCRDHAQGLRSLCSSGAQLAIMFFWDFRYCWDNFVHNSGREFRPWKKINVNSRLLATKLEDILK

SEQ ID NO: 71 - protein, 437 aa, synthetic construct
  REGION 1..437: note = pYY-BEM3.2; tr|D1LZA1|D1LZA1_PANTI polypeptide sequence
MEPWRPSPRNPMDRIDPKTFRFQFPNLRYASGRKLCYLCFQVERDYFYYNDSDWGVFRNEVHPWAPCHAEQCFLSWFRDQYPYRDEDYNVTWFLSWSPCPTCAEEVVEFLEEYRNLTLSIFTSRLYYFWHPNYQEGLCKLWDAGVQLDIMSCDEFEYCWDNFVYHKGMRFQRRNLLKDYDFLAAKLQEILSPGQQRKRDWPFPPRPGAQVDPRSWVQEVTEPGINTRRHPLHLLVSFLLPRPTMNPLQEDIFYRQFGNQHRVPKPYYYRRKTYLCYQLKLPEGTLIDKDCLRNKKKRHAEICFIDKIKSLTRDTSQRFEIICYITWSPCPFCAEELVAFVKDNPHLSLRIFASRLYVHWRWKYQQGLRHLHASGIPVAVMSLPEFEDCWRNFVDHQDRLFQPWRNLDQYSESIKRRLGKILTPLNDLRNDFRNLKLE

SEQ ID NO: 72 - protein, 440 aa, synthetic construct
  REGION 1..440: note = pYY-BEM3.3; tr|A0A3Q0DM17|A0A3Q0DM17_TARSY polypeptide sequence
MPMKRMYSNIYFDHFNNQRLLSGQNAPWLCFKVERVENCMLVPLETGVFGNQVSGCCGKTERPVEPTSLTRSVLVSPNPGTELRAQQPSRKGHLGKLGCVEYPSPGLALVMLGYGASTYCPDSSMYCPETCHHPEMCFLYWFEKTLSHEEQYQITWYVSWSPCVNCAEEVAEFLSVHPKVNLTIYAARLYCYQKLNHRQGLRRLCKEGACVKIMNYEEFDHCWENFVYNNYKSFKPWVKLQDNYELLATELDKILRIPMERMPQKKFRFHFQNLIAKDRNTTWLCFEVKNVRKKHPPDLLERGIFQNQVTPRINCHAEMCFLSWFLENMLLHGKRYQVTWYISWSPCSICAEEVAEFLSAHPKVSLTIYAARLYYFWVPGYRQGLRRLVEEGARVEIMNYEEFDYCWENFVSINNEPFQPWEGLHEKYGYLVTKLNNILG

SEQ ID NO: 73 - protein, 453 aa, synthetic construct
  REGION 1..453: note = pYY-BEM3.4; tr|A0A3Q0DNJ5|A0A3Q0DNJ5_TARSY polypeptide sequence
MEDNPEPRPRQQMDQDTFIFNFNNDPSVRGRHQTFLCYEVEHLDDDTWVPQDKYLGFLHNQPQSRSNAYCAYHAELCFLELVSSWQLDPAQRYRVTCFISWSPCSSCAQEVAAFLKKNRHVTLRILAARIYDYYQGYEDGLRTLQGVGVDITVMTSAEFGHCWNTFVDHQGSPFQPWEGLDQHSQVIWQRMQDILQVIPAKYLMEKVKYTVTVDILFKGRVPGPRYLMDQNTFTRNFINNLSVSGRRQTLLCYEVERLGGDIWVPLDQLRGFLLSQARDVLNYYQGRHAEPCFLDLVSSWQLDPAQHYRVTWFISWSPCTSCAQAVAAFLRENRHVTLRILAARIYDYHQGYEEGLRTLQRTGAHIDIMTFKEFGHCWNTFVNHKGSPFKSWTGLDQHSQALRKRLQDILHTMASSLWDQSEPKKPIPSQEVTLPESIPPSHGNRFRLVKRPS

SEQ ID NO: 74 - protein, 424 aa, synthetic construct
  REGION 1..424: note = pYY-BEM3.5; tr|G5AYU5|G5AYU5_HETGA polypeptide sequence
FCFLSCVHRKPIERIYKKAFRFYFRNLRCAYGRNKTFLCYEVKRERDNKVLHKGVVLNQVEPYMPLHAELRFLSWFHDTLLCPLGSYQVTLYVSWSPCSECAEELTTFLAGHRNVTMTIYVAQLYYCNWKSPNREGLKILIAEDARLRVMFYDEFLYCWRNFVKNDYNNFDPWSLLDENSRYHNRILQNILKGWGRPHRVGPEGEQTATPGGSGGHCISVFSLLRRREMTLKEETFRVQFNNAYKAPKPYRRRVTYLCYQLQEANGDPLTKGCLRTKKGYHAESRFIKRICSMDLGQDQSYQVTCFLTWSPCPHCAQELVSFKRAHPHLRLQIFTARLFFHWKRSYQEGLQRLCRAQVPVAVMGHPEFAYCWDNFVDHQPGPFEPPWAKLEYYSSCLKRRLQQILRSWGVDDLTNDFRNLQLGP

SEQ ID NO: 75 - protein, 385 aa, synthetic construct
  REGION 1..385: note = pYY-BEM3.6; tr|A0A2Y9QMV5|A0A2Y9QMV5_TRIMA polypeptide sequence
MLSSPQTPGTRKPMKTLAPDEFSFNFENLRLAHGRNTTFLCFQVETKAPPSLNSPDSGIFQNQDHCPSHHHAEMVFLTWFQKRLSPAQHYEVTWYMSWSPCSRCAVQVAKFLKSNSTVNLSIFVARLYYPRELETKDGLHSLWQAGAQVQIMFFQDFKYCWENFVNNEGKPFQPWKNLDENSKDWDTELKDIHRNTTDLLTEEMFYSQFYNREKKSSIPRKTYLCYQLNEPQPVKRCLHYKKGYHAVTRFIDGIVSMNLDPARSYDITCYFTWSPCNRYARKLVSFIEDYPNLRLKVYTSRLYFHWCWTNMQGLQHLQNSRVTVAVMTFRDFEYCWKNFVDNQGKPFEPWEKLDLYSQSTERRLRRILKPLTPDVLNEDFGNLHL

SEQ ID NO: 76 - protein, 381 aa, synthetic construct
  REGION 1..381: note = pYY-BEM3.7; tr|H0XHI0|H0XHI0_OTOGA polypeptide sequence
LSCAFRDPMNRMYPKTFCQNFEKEPCPSNQNSSWLCFEVETKNSAVFFHRGVFRNQPAPPPRAPTSVLLSQGPVKTPCHAEECFLTWIQGVLPPDHHYHVTWYVSRGPCANCANLIVHFLAMHRRVTLTIFAAHLNFFWESDFQQGLLRMDQEGVQLHIMGYEEFEYCWDNFVYNQRKQFVPWNGLNENYEFMVSTLEDILRSPLDRIRQKDFSIHFRNSLWLDDKSTWLCFEVKRTKSPVPLYRGVFRNQSPPKTPCHAEVRFFTWLQDLPPDFCCQFTWYLSWSPCADCADLVANFLAKHRNVSLTIFVARLYYYRDPEMHRGLRRMYQEGANVDIMSVIEFEYCWDNFVYNQGKQFVPWNGLNENYEFLVPRLQEILE

SEQ ID NO: 77 - protein, 337 aa, synthetic construct
  REGION 1..337: note = pYY-BEM3.8; tr|A0A3M0K4Y7|A0A3M0K4Y7_HIRRU polypeptide sequence
MYISKKALRRHFDPRVYPRETYLLCELQWEGSRRVWIHWIRNVPDHHAEEYFLEEVFEPRNYGFCNITLYLSWSPCCTCCSKIRDFLKRNPNVKIDIRVARLIYPDYAETRSSLRELNGLQRVSIQVMEAAGLSCIESKNHRISQVERDPKGSSSPTLFTLQDHLKLSNMTESVIQDSVSIQICYQMRILGFQCHIRWKLQPEDFQRNYSPNQIGRVVYLLYEVRWRRGSIWRNWCSNNPEQHAEVNFLENHFHHRPQTPCSITWFLSTSPCGKCSRRILEFLKSQPNVTLEIYAAKLFRHHDIRNRQGLRNLMMNGVTIYIMNLEGNPASLCLSVD

SEQ ID NO: 78 - protein, 237 aa, synthetic construct
  REGION 1..237: note = pYY-BEM3.9; tr|A0A3P4LUZ8|A0A3P4LUZ8_GULGU polypeptide sequence
MSFEDYEYCWETFVDHKGMYFQSWDLLRDNDLLAAELKNILRSTMNPLRQEIFYHQFGNQPRAPRPYHRRKTYLCYQLQPHEGPITARVCLQNKKKRHAEIRFIDNIRALRLDRSQTFEITCYLTWSPCPTCAKALAVFVQDHPHISLRLFASRLFIHWCWKYQEGLRLLHRSRIPVAVMRLQEFEDCWRNFVDNQDEPFQPWNKLEQYSESITRRLRRILGHPQNNLENDFRNLHI

SEQ ID NO: 79 - protein, 221 aa, synthetic construct
  REGION 1..221: note = pYY-BEM3.10; tr|G5BPM8|G5BPM8_HETGA polypeptide sequence
RRRIEPWQFEASFDPRQLRRETCLLSEVRWGTSPRAWRGCSLNTARHAEVSFMDRLTSEGRLRGPVRCSITWFLSWSPCGACAQAIGEFLRQHPNVSLVIYIARLFWHVDEQNRQGLRDLVTRGVRMQVMSDPEFAHCWRNFVNYSPGQEARWPQVPPVWTWLYSLELHCILLNLPPCLKISRRHHNQLTFFQLILQNCHYQAIPSPVLLASGLIHPFVTW

SEQ ID NO: 80 - protein, 211 aa, synthetic construct
  REGION 1..211: note = pYY-BEM3.11; tr|H2M862|H2M862_ORYLA polypeptide sequence
MITKLDSVLLPKKKFIYHYKNMRWARGRHETYLCFVVKRRVGPESLSFDFGHLRNRNGCHVELLFLRHLSALCPGLWGYGATGQGRVSYSITWFCSWSPCANCSFRLAQFLSQTPNLRLRIFVSRLYFCDLEDSREREGLRMLKKVGVHITVMSYKDYFYCWQTFVARKQSKFKPWDGLHQNSVRLSRKLNRILQPCETEDFRDAFKLLGL

SEQ ID NO: 81 - protein, 353 aa, synthetic construct
  REGION 1..353: note = pYY-BEM3.12; tr|H0Y0C6|H0Y0C6_OTOGA polypeptide sequence
MYLKTFYRHFNNRPYLSRRNDTWLCFEVKTTSSNSPGSFYSGVFRNQGPRYCPWHTELCFLTWVRPIVSHHHFYQITWYMSWSPCANCAWQVATFLATHENVSLTNYTVRIYYFWRQDYRQGLLRMIEEGTQVYVMSSKEFQHCWENFVDHWGTRWVTCWNRLKKNYEFLVTRLSEILSDPKERISPNTFYNQFNNTPVPRGRKDTWLCFEVKEKNSNSPGSFHRGVFQNQVFSGTSSHARRCPPDHHYEVTWYTSWSPCAHCAWHVVNFLTSNPNVSLTIFAARLYYIYRPEIQQGLRRVFQEGAKVHIMSLKEFKYCWAKLVYNSGMRFMPWYQFNFNFLFPNTTLKGDLH

SEQ ID NO: 82 - protein, 189 aa, synthetic construct
  REGION 1..189: note = pYY-BEM3.13; tr|A0A3Q2Z5X6|A0A3Q2Z5X6_HIPCM polypeptide sequence
MDVHFMNFIYHYKNMRWAKGRNETYLCFVVKRRVGPNSLTFDFGHLRNRNGCHVELLFLRYLGRRLSYSITWFCSWSPCANCSAALSQFLSRMPNLRLRIFVARLYFCDMEDSHEREGLRLLQKAGVQVTVMSYKDYYYCWQTFVDRKKSHFKAWEDLHQNSVRLSRKLNRILQPCEMDLRDAFKLLGL

SEQ ID NO: 83 - protein, 190 aa, synthetic construct
  REGION 1..190: note = pYY-BEM3.15; tr|A0A2K6NY90|A0A2K6NY90_RHIRO polypeptide sequence
MNPHIRNPMEAMYPGTFYFHFKNLWEADNRNESWLCFAVEVIKHHSTVSWKRGVFRNQVDPETHCHAEKCFLSWFCDNTLSPKKNYQVTWYTSWSPCPECAREVAKFLARHSNVMLTIYTARLYYSQYPNYQEGLRRLNEEGVPVEIMDYEDFKYCWENFVYNGDELFKPWKGLKYNFLFLDSKLQEILE

SEQ ID NO: 84 - protein, 202 aa, synthetic construct
  REGION 1..202: note = pYY-BEM3.16; tr|Q6ICH2|Q6ICH2_HUMAN polypeptide sequence
MNPQIRNPMERMYRDTFYDNFENEPILYGRSYTWLCYEVKIKRGRSNLLWDTGVFRGPVLPKRQSNHRQEVDPETHCHAERCFLSWFCDDILSPNTNYEVTWYTSWSPCPECAGEVAEFLARHSNVNLTIFTARLCYFWDTDYQEGLCSLSQEGASVKIMGYKDFVSCWKNFVYSDDEPFKPWKGLQTNFRLLKRRLREILQ

SEQ ID NO: 85 - protein, 202 aa, synthetic construct
  REGION 1..202: note = pYY-BEM3.17; tr|G8GPV1|G8GPV1_CERNE polypeptide sequence
MDGSPASRPGHVMDPGTFTSNFNNKPWVSGQRETYLCYKVERSHNDTWVLLNQHRGFLRNQAKNRLHGDYGCHAELCFLGEVPSWRLDPTQTYRVTWFISWSPCFSGGCAEQVRAFLQENTHVRLRIFAARIYDYDFLYQEALRTLRDAGAQVSIMTYEEFKHCWDTFVDHQGRPFQPWDGLDEHSQALSGRLQAILQNQGN

SEQ ID NO: 86 - protein, 181 aa, synthetic construct
  REGION 1..181: note = pYY-BEM3.18; tr|Q1WBT6|Q1WBT6_SYMSY polypeptide sequence
MALLTAKTFRLQFNNKRRVTKPYYPRKALLCYQLTPQNGSTPTRGYFKNKKKRHAEIRFINKIKSMGLDETQCYQVTCYLTWSPCPSCAWELVDFIKAHDHLNLGIFASRLYYHWCRHQQEGLRLLCGSQVPVEVMGFPEFADCWENFVDHEEPLSFNPSEMLEELDKNSRAIKRRLEKIK

SEQ ID NO: 87 - protein, 211 aa, synthetic construct
  REGION 1..211: note = pYY-BEM3.19; tr|A0A3B4CS14|A0A3B4CS14_PYGNA polypeptide sequence
MDNTNRRKFIYHYKNVRWARGRHETYLCFVVKKRNSPDSLSFDFGHLRNRNGCHVELLFLRYIEVLCPGLWGSGVDGVRVSYAVTWFCSWSPCSNCAQRLTNFLSQTPNLRLRIFVARLYFCDEEDSLEREGLRHLQRAGVQITVMTYKDFFYCWQTFVASRERCFKAWEGLRQNSVRLSRKLNRILQVFISTPVISPLITTHLGQSWAGG

SEQ ID NO: 88 - protein, 315 aa, synthetic construct
  REGION 1..315: note = pYY-BEM3.20; tr|A0A087XZI4|A0A087XZI4_POEFO polypeptide sequence
RKVSYSVTWFCSWSPCANCSIRLAQFLHQTPNLRLRIFVSRLYFCDLEDSREREGLRILKKAGVHITVMSYKDYFYCWQTFVAKSQSKFKPWDGLHQNYIRLSRKLNRILQPALDIKKFIYHYKNLRWARGRCETYLCFVVKKKLHLFMFVIVGRNRLFDLNVTMNNKSLYLIPLHLQLLFLRHLGALCPGLWGYGVTGERKVSYSVTWFCSWSPCANCSIRLAQFLHQTPNLRLRIFVSRLYFCDLEDSREREGLRILKKAGVHITVMSYKDYFYCWQTFVAKSQSKFKPWDGLHQNYIRLSRKLNRILQVQFF

SEQ ID NO: 89 - protein, 189 aa, synthetic construct
  REGION 1..189: note = pYY-BEM3.21; tr|A0A341AEK4|A0A341AEK4_9CETA polypeptide sequence
MASDRGPSAGDATSRRRIEPWEFEVSFDPRELCKETRLLYEIKWGRSQHVWRHSGKNTTNHVECNFIEKFTSERPFHRSVSCCITWFLSWSPCWECSKAIREFLNQHPRVTLFIYVARLFQHMDPQNRQGLRDLIHSGVTIQIMGPTEYDYCWRNFVNYPPGKEAHWPRYPPPLMKLYALELHCIILVP

SEQ ID NO: 90 - protein, 180 aa, synthetic construct
  REGION 1..180: note = pYY-BEM3.22; tr|E2D879|E2D879_MUSMI polypeptide sequence
RNLISRETFNFNFENLCYAKGRKNTFLCYEVTRKDCDSPVSLCHGVFKNKGSIHAEICFLYWFHDKVLKVLTPREEFKVTWYMSWSPCFECAEQVVRFLATHHNLNLTIFSSRLYNVSDPDTQQKLCRLVQEGAQVAVMDLSEFKKCWEKFVDNDGQQFRPWKRLRTNFRYQNSKLQEIL

SEQ ID NO: 91 - protein, 221 aa, synthetic construct
  REGION 1..221: note = pYY-BEM3.23; tr|A0A2K5RDN6|A0A2K5RDN6_CEBCA polypeptide sequence
MWEAQSPGLSREWGSVAISPEDPGPLHIGRFLSCAFRHPMNAMYPGIFNFHFRNLRKAYGRNETWLCFTVEGIMNRSTVSWKSGVFRNQVGSDPFCHAEMCFLSWFRHNMLSPKKDYEVTWYASWSPCPECAGQVAEFLARHGNVRLTIFTAHLYYFWNPSFRQGLRRLSQEGASVLIMGYEDFEYCWDNFVYNDGQPFKPWKRLQDNSLSLYITLQEILQ

SEQ ID NO: 92 - protein, 206 aa, synthetic construct
  REGION 1..206: note = pYY-BEM3.24; tr|A0A2K5RDN7|A0A2K5RDN7_CEBCA polypeptide sequence
MEASPASRPRPLMGPRTFTENFTNNPEVFGRHQTYLCYEVKCQGPDGTRDLMTEQRDFLCNQARNLLSGFDGRHAERCFLDRVPSWRLDPAQTYRVTCFISWSPCFSCAREVAEFLQENPHVNLRIFAARIYDCRPRYEEGLQMLQNAGAQVSIMTSEEFRHCWDTFVDHQGHPFQPWEGLDEHSQALSRRLQAILQGNRWMILSL

SEQ ID NO: 93 - protein, 184 aa, synthetic construct
  REGION 1..184: note = pYY-BEM3.25; tr|A0A1C9CJ69|A0A1C9CJ69_CERAL polypeptide sequence
NPMKAMDPHIFYFHFKNLRKAYGRNETWLCFAVEIIKQRSTVPWRTGVFRNQVDPESHCHAERCFLSWFCEDILSPNTDYRVTWYTSWSPCLDCAGEVAEFLARHSNVELAIFAARLYYFWDTHYQQGLRSLSEKGASVEIMGYEDFKYCRENFVCDDGKPFKPWKGLKTNFRFLKRRLQEILE

SEQ ID NO: 94 - protein, 197 aa, synthetic construct
  REGION 1..197: note = pYY-BEM3.26; tr|A0A2R2Z4D2|A0A2R2Z4D2_PTEAL polypeptide sequence
MHLQVWRKVTEAWREGYTLKPWSRNPMERLYHDYFYFHFYNLPTPKHRNGCYICYQVEGTKKHSRMPLLRGVFENQESLDMMLSPGEKYRVTWYISWSPCFACVDEVIKFLREHTNVELIIFAARLYHSDILQYRQGLRKLHDAGVHVAIMSYYEFKHCLNDFVFHQGRSFCPWNDLNKNSKNLSNTLEDILRNQED

SEQ ID NO: 95 - protein, 206 aa, synthetic construct
  REGION 1..206: note = pYY-BEM3.27; tr|B7T161|B7T161_SHEEP polypeptide sequence
MTEGWAGSGLPGRGDCVWTPQTRNTMNLLRETLFKQQFGNQPRVPPPYYRRKTYLCYQLKELDDLMLDKGCFRNKKQRHAEIRFIDKINSLNLNPSQSYKIICYITWSPCPNCASELVDFITRNDHLNLQIFASRLYFHWIKPFCRGLHQLQKAGISVAVMTHTEFEDCWEQFVDNQLRPFQPWDKLEQYSASIRRRLQRILTAPT

SEQ ID NO: 96 - protein, 205 aa, synthetic construct
  REGION 1..205: note = pYY-BEM3.28; tr|A0A2R2X2G4|A0A2R2X2G4_PTEAL polypeptide sequence
MAGLGQACEGCCGQMPEISYPMGRLDPKTFSFEFKNLPYAYGRKSSYLCFQVEREQHSSPVPSDWGVFKNQFCGTEPYHAELCFLNWFRAEKLSPYEHYDVTWFLSWSPCSTCAEEIAIFLSNHKNVRLNIFVSRIYYFWKPAFRQGLQELDHLGVQLDAMSFDEFKYCWENFVDNQGMPFRCWKKVHQNYKSVLRKLNEILRRR

SEQ ID NO: 97 - protein, 309 aa, synthetic construct
  REGION 1..309: note = pYY-BEM3.29; tr|G1Q1M4|G1Q1M4_MYOLU polypeptide sequence
YAELSFLDLFQSWNLDRGRQYRLTWYMSWSPYPDCAQKLVEFLGENSHVTLRIFAADIHSLCSGYEDGLRKLRDARAQLAIMTRDELQYCWVTFVDNQGQPFRPWPNLVEHIKTKKQELKDILGNPMRRMYPKTFNFNFQNLNSYGRKSTFLCFEVETWEDGSVLDYQNGVFQNQLDPGHAELCFIEWFHEKVLFPDEVRCPDAQYHVTWYISWSPCFECAEQVAGFLNEHENVDLSISAARLYLCEDEDEQGLQDLVAAGAKVAMMAPEDFEYCWDNFVYNRGWPFTYWKHVRRNYGRLQEKLDEILW

SEQ ID NO: 98 - protein, 216 aa, synthetic construct
  REGION 1..216: note = pYY-BEM3.30; tr|A0A1S3AN78|A0A1S3AN78_ERIEU polypeptide sequence
RRIEPWEFEDFFDPRQFRPETCLLYEVRWGSSRNAWRSTARNTTRHAEVNFLERFAAERHFDKPVSCSITWFLSWSPCWECSQAIGAFLSQHPQVTLAIHVTRLFHHEDEQNRQGLRDLLARGVTLQVMGDSEYAHCWRTFVNSPPGAEGHYPRYPSDFTRLYALELHCIILGLPPCLEILRRYQNQFTLFRLVPQNCHYQMIPHLNFFVVRHYFF

SEQ ID NO: 99 - protein, 201 aa, synthetic construct
  REGION 1..201: note = pYY-BEM3.32; tr|Q4VUI3|Q4VUI3_XENLA polypeptide sequence
MTMDSMLLKRNKFIYHYKNLRWARGRHETYLCYIVKRRYSSVSCALDFGYLRNRNGCHAEMLFLRYLSIWVGHDPHRNYRVTWFSSWSPCYDCAKRTLEFLKGHPNFSLRIFSARLYFCEERNAEPEGLRKLQKAGVRLSVMSYKDYFYCWNTFVETRESGFEAWDGLHENSVRLARKLRRILQPPYDMEDLREVFVLLGL

SEQ ID NO: 100 - protein, 191 aa, synthetic construct
  REGION 1..191: note = pYY-BEM3.33; tr|E2RL86|E2RL86_CANLF polypeptide sequence
MNPLQEETFYQQFSNQRVPKPTYQRRTYLCYQLKPHEGSVIAKVCLQNQEKRHAEICFIDDIKSRQLDPSQKFEITCYVTWSPCPTCAKKLIAFVNDHPHISLRLFASRLYFHWRQKYKRELRHLQKSGIPLAVMSYLEFKDCWEKFVDHKGRPFQPWNKLKQYSESIGRRLQRILQPLNNLENDFRNLRL

SEQ ID NO: 101 - protein, 226 aa, synthetic construct
  REGION 1..226: note = pYY-BEM3.34; tr|G1LWB0|G1LWB0_AILME polypeptide sequence
SSAAPASIHLLDEDTFTENFRNDDWPSRTYLCYKVEGPDQGSGVPLGQDKGILHNKPAQGPEPSRHAECYLLEQIQSWNLDPKLHYGVTCFLSWSPCAKCAQKMARFLQENSHVSLKLFASRLYTRERWDEDYKEGLRTLKRAGASIAIMTYREFEHCWKTFVLHDQEGSCFQPWPFLHKESQKFSEKLQAILQVGVLLLSLPPPLPSSPLSSPWPFPAPLRASTG

SEQ ID NO: 102 - protein, 238 aa, synthetic construct
  REGION 1..238: note = pYY-BEM3.35; tr|A0A1U7S7K7|A0A1U7S7K7_ALLSI polypeptide sequence
MGEHWQYAGSGEYIPQDQFEENFDPSVLLAETHLLSELTWGGRPYKHWYENTEHCHAEIHFLENFSSKNRSCTITWYLSWSPCAECSARIADFMQENTNVKLNIHVARLYLHDDEHTRQGLRYLMKMKRVTIQVMTIPDYTYCWNTFLEDDGEDESDDYGGYAGVHEDEDESDDDDYLPTHFAPWIMLYSLELSCILQGFAPCLKIIQGNHMSPTFQLHVQDQEQKRLLEPANPWGAD

SEQ ID NO: 103 - protein, 220 aa, synthetic construct
  REGION 1..220: note = pYY-BEM3.36; tr|A0A2R2X2J8|A0A2R2X2J8_PTEVA polypeptide sequence
MPRIGNMNLLSEKTFNYHFGNQLRVKKPQGRRRTYLCYKLKLPNETLVKGYFINKKKNHAEIRFINKIRSLNLDQTQSYKITCYITWSPCSYCAGKLVALVKSCPHLSLQIFTSRLYYHWLWKNQAGLRYLWKINISVLVMKEPEFADCWDNFVNHQSRRFKPWEKLTQYSNSTERRLLRILRINRTDLFLAQSSEQDPGLNDLVDAIKRLFLDAHRPRD

SEQ ID NO: 104 - protein, 198 aa, synthetic construct
  REGION 1..198: note = pYY-BEM3.37; tr|A0A151P6M4|A0A151P6M4_ALLMI polypeptide sequence
MAVEEEKGLLGTSQGWKIELKDFQENYMPSTWPKVTHLLYEIRWGKGSKVWRNWCSNTLTQHAEVNCLENAFGKLQFNPPVPCHITWFLSWSPCCQCCRRILQFLRAHSHITLVIKAAQLFKHMDERNRQGLRDLVQSGVHVQVMDLPDYRYCWRTFVSHPHEGEGDFWPWFFPLWITFYTLELQHILLQQHALSYNL

SEQ ID NO: 105 - protein, 158 aa, synthetic construct
  REGION 1..158: note = pYY-BEM3.38; tr|A0A2K6MNR2|A0A2K6MNR2_RHIBE polypeptide sequence
IWLCFTMEIIKQCSTVSWKRGVFRNQVDPETHCHAERCFLSWFWEDTLSPNTNYQVTWYTSWSPCLDCAGEVAEFLARHSNVKLAIFAARLYYFWDTDYQQGLRSLSEEGTSVEIMGYEDFKYCWENFVYNGDEPFKPWKGLKYNFLFLDSKLQEILE

SEQ ID NO: 106 - protein, 182 aa, synthetic construct
  REGION 1..182: note = pYY-BEM3.40; tr|F1CGT0|F1CGT0_ANOCA polypeptide sequence
KAAILLSNLFFRWQMEPEAFQRNFDPREFPECTLLLYEIHWDNNTSRNWCTNKPGLHAEENFLQIFNEKIDIKQDTPCSITWFLSWSPCYPCSQAIIKFLEAHPNVSLEIKAARLYMHQIDCNKEGLRNLGRNRVSIMNLPDYRHCWTTFVVPRGANEDYWPQDFLPAITNYSRELDSILQD

SEQ ID NO: 107 - protein, 230 aa, synthetic construct
  REGION 1..230: note = pYY-BEM3.41; tr|C7AGG3|C7AGG3_HORSE polypeptide sequence
MDPQAPTQRGGLGQAYQGGDYVQAPGNGNTQHLLSEDVFKKQFGNQRRVTKPYYRRKTYVCYQLKLLRGPTIAKGYFRNKKKRHAEIRFIDKINSLGLDQDQSYEITCYVTWSPCATCACKLIKFTRKFPNLSLRIFVSRLYYHWFRQNQQGLRQLWASSIPVVVMGYQEFADCWENFADNRGNPFQSWEKLTEYSKGIKRRLQKILEPLNLNGLEDAMGNLKLGSVDLG

SEQ ID NO: 108 - protein, 197 aa, synthetic construct
  REGION 1..197: note = pYY-BEM3.42; tr|A0A250YMK7|A0A250YMK7_CASCN polypeptide sequence
MSLLKEDIFLYQFNNQQQVQKPYFRRRTYLCYQLEQPNGSRPQWPAKGCLQNKKGHHAEIRFIKRIHSMGLEQDQDYQITCYITWSPCLACACALAELKNHFPRLTLRIFASRLYFHWIRKFQMGLQHLYKSGVLVAVMSLPEFTDCWEKFVNHRQVFFTPWDKLEEHSRSIQRRLRRILQSWDVDDLTDDFRNLRL

SEQ ID NO: 109 - protein, 189 aa, synthetic construct
  REGION 1..189: note = pYY-BEM3.43; tr|B7T160|B7T160_SHEEP polypeptide sequence
MPWISDHVARLDPETFYFQFHNLLYAYGRNCSYICYRVKTWKHRSPVSFDWGVFHNQVYAGTHCHSERRFLSWFCAKKLRPDECYHITWFMSWSPCMKCAELVAGFLGMYQNVTLSIFTARLYYFQKPQYRKGLLRLSDQGACVDIMSYQEFKYCWKKFVYSQRRPFRPWKKLKRNYQLLAAELEDILG

SEQ ID NO: 110 - protein, 541 aa, synthetic construct
  REGION 1..541: note = pYY-BEM4.1; tr|A0A182D0J1|A0A182D0J1_BLAVI polypeptide sequence
MTNPESPPQAPCDFNEDALLNREPLRGSPIKFVSPVDYPDLVFALAGPVGVDIDYIQQSISDCLKSFDYSTEFIRITEIMQDIKCSKTIDCTDMLKEYQSKIEYANELRRAYRAKDLLAALTISAISKLREQIKERDEATNKSNIQPSRRKLAWVVRQLKTPEEVRLLRAVYGKQFVLVSIYSSPQRREDFLISKIKIKSRGTIDNNTSSEGAQRLIERDSKEDNEYGQNLSGTFCLGDIFVDSNNKESAIVSIDRFLNAFFGSNEISPTRDEYGMYLAKTASLRSCDLSRQVGAAIFSKTGEIISLGSNEVPKAGGGTYWTGDNADSRDIRLGHDPNEINKVEIFAEIISRLLEDKLLSNDLLNKDAASIVTILLSKNEGKRYKDLRVMDIIEFGRIIHAEMSAICDAARNGRAIIGATLFCTTFPCHLCAKHIVASGIGRIVYLEPYPKSYAKKLHSDSIQVEDHSDSEKVSFEPFIGISPSRYRELFEGGRRKDPFGEALKWKNDPRKPVIDVVVPPHFEAEKLVIAQLGKLIVSGTG

SEQ ID NO: 111 - protein, 330 aa, synthetic construct
  REGION 1..330: note = pYY-BEM4.2; tr|A0A2D6EXD2|A0A2D6EXD2_9ARCH polypeptide sequence
MIIGLVGTIGAGKQTIIDYLQEKYGYNALSCSDVLREILKKQGKPVTRDNLREIGNKTREEGGNGAIAKILLEKLRNNWKANYIVDSLRHPDEVSVLRTSPLFHLVAVDADLRIRFERVKARKREEEPTTLPAFVERDQKEMFGTGNEQRIRETMELADELVLNNGTVEELKQRIDDLNLVSDERLRPSWDDYFMRLARLAAQRSNCMSRKVGAIITKDRRVIATGYNGTPRGVKNCNEGGCERCNSAVAKGTAISECLCLHGEENAIIEAGRVRSEGATIYTSFLPCLWCTKMIIQAGLKEVVFSEVYDLHEASIKLFETSGVLIRRLK

SEQ ID NO: 112 - protein, 367 aa, synthetic construct
  REGION 1..367: note = pYY-BEM4.3; tr|F7YVM7|F7YVM7_9THEM polypeptide sequence
MNEFKYMSLALKLAKKGKYTTSPNPMVGAVIVKDGKILATGYHKKAGQPHAEINALSKLNFQAQNCEMYVTLEPCSHYGRTPPCADAIIRSGIRKVVIATLDPNPLVNGKGVEKLKNAGIEVVCGVLEEKAKKLNEKFFKYITTKIPFVALKIAQTLDGKIALKNGESKWITSEKSREYVHKLRMEYDAVLTGIGTILKDDPQLNVRLKKVYKQPLRIILDSKLKIPLSAKVLEDPSKVIILTTALADKEKLEELRSKGVEVIITNEKNGIVDLESALKILGEKKITSVMVEAGPTLLTSFLKESLFDKIYLFIAPKIFGADSKSVFSELGLEDISKSQKFSLESVKKIGEDLLLELYPKQLKKLEE

SEQ ID NO: 113 - protein, 449 aa, synthetic construct
  REGION 1..449: note = pYY-BEM4.4; tr|A0A3M6UNF1|A0A3M6UNF1_9CNID polypeptide sequence
MEEKSELENELMRSTSPKPSVPNGSKGNECEQRETRITKENLYMVLALWMEEFPVVEQTSSAKRLNKVGVVFVLPTDRVLAADCSRDGVHGVARVMVNHCGKLEGCKVFVSRKPCSLCAKLLVQSKVSRVFYLPIEPESENKGEIARADNLFKNSSVGQSVFVPCVEQKVLDKLEDKLPKEIITPDDISECRDNLLKKCGWSAEWFARAQASLPWPCFEGKMKSQVDNDFKSLIKWIAVVKAPMDKGVAFPKVKLTSDSRVVPDCDADNFPDSKTAYHMMIFAKMLARQTDDPKTGVGAVIVRGKVPDIVSLGWNGFPSKALYGEFPRASDDDRALQKKFPYVIHAEQNALMVRNVKDLTDGILFVTKPPCDECAPMIKLSGVKTIVIGEKIEKSRGGELSYNLIKEYIKEGIMTCYQMEATKTKAKRLASDPETRKRLKSSCSNSNDV

SEQ ID NO: 114 - protein, 414 aa, synthetic construct
  REGION 1..414: note = pYY-BEM4.5; tr|A0A2G3K826|A0A2G3K826_9BURK polypeptide sequence
MTKIIDDVNTAAAAVLDQATAAANQTTFAVGGVMVNNQTGEVISAIHNNVIIPLSNNVSFTFDPTAHGERQLVYWYYANKEALKLPEPNQITVITSLDPCAMCTGALLTAGFNVGVVAIDTYAGINCAQNFQFATLPANLRTKAQKNFGYYASGAANFKPLTRSYVGGPSVAFKNGVVTPANLRDCGTVFTQSVDTVRNTSNSTGLAPSQMSNPAELPSNSAILQAYRAIYKKAFTIKIDNPRLPDAQILTELKAVLADAPNARNAVAFIDPFGNLVLCMADAFNTSPVHAAFMNVTQEYAKTRWDLMNKYAQASTTDNPALYLTHPKYGTFVYLYAPDPDDSITIMSLGAYGSTMEGPIPNMFPSNLQFYYPPRNGAQFSELVPVVNELPPFYTQNVNISLMQVPGVTQAPTK

SEQ ID NO: 115 - protein, 308 aa, synthetic construct
  REGION 1..308: note = pYY-BEM4.6; tr|K1ZCJ4|K1ZCJ4_9BACT polypeptide sequence
MSSRAKKNRSTNLKKSIGQKSIENKPTDQKKDQVLVAYVPVIHEGYRRFFRHFPAVKELWLISQELSHELRSLQKDIRALKASETKKLLQTWGQFQKIKLLTPSSLAILQKTTTQLVFPDEEISHHLVEKYFAQNRVLFASFFLRWDKKSSLKKHDLQEYSEISNKEFDQMMIAIAQQEADKSDDWWRQVGGLIFKDETILLLAHNQHTPTEAEAYFAGDPRADFHQGEYLKISTAIHAEAYLIAQAAKQGISLEGADLYVTTFPCPVCAKQVAYSGIKRVFFREGYSLLDGETILKANGVKLIRVTV

SEQ ID NO: 116 - protein, 615 aa, synthetic construct
  REGION 1..615: note = pYY-BEM4.7; tr|A0A1G3PNQ8|A0A1G3PNQ8_9SPIR polypeptide sequence
MRDLPLLVLGLTGPMGAGCTRFARDISKMEPGKVIKKQGLLDQVAHEISELSKKASEIRLQCISNGKNSELAELKRLNRRLNAKLAERACLHVIAKSSLPEPLFISLNTIVIKIAVDSITAPEFAEWAKNHAKVADLLKWLRTQWESELTLYETWGQDAGRFSQDELEKMDAMFAEFERIGDEILKEDFETYFGKRNNDFSIRMFSENIRLSGNPFRPAENGGGGGKYDEPSMVMIARETDRYIRFYRTRSDQKRSHFFIIDEIKNPREAEYFRARHQNFFLVSIFSSSEIRASRMRRGLGHDAGVSDADFQHLFRELDSRDWGADDFDAHGLHRQNIYRCFNLADIAINNDVEDERFSEVLFNKFIRYYALMLSPGCVQPTPQETYMHLAYSLSLRSTCISRQVGAVITDLEDRILSLGWNEVPEGQIGCGLKVKKDYTDKENPLFEMEIWDNVITAEDLAVWDDEDSICVKDILSRIEIKTKLKSVSLTPEERADVLKALRIKRLEYSRSLHAEENAILQVASRGGVGLKDGTIYVTTFPCELCSKKIYQVGISKIYYTEPYPNSISEKVILKDGIRNIKILQFEGVKSYSYFKLFKPGFDKKDAQMLEGRGI

SEQ ID NO: 117 - protein, 291 aa, synthetic construct
  REGION 1..291: note = pYY-BEM4.8; tr|A0A1G0PGF4|A0A1G0PGF4_9BACT polypeptide sequence
MKHNNQLRKEIEKLLGQNSIIKNDELKKLQKEYKIETDELLISFLPYAAEFAKVPISKYKVGAVVLGKSGNIYFGSNMEFEAGALSATVHAEQSAVNNAWLNGETGINKIAVTAAPCGYCRQFLNELTTAKQLHVLLKDKNLEAAKVFKLTELLPEAFGPRDLEIEGGLMKVENHKLKIENINDELINAALEAANKSYAPYSKNYSGVSIQLSDGTIFSGRYSENAAYNPSLLPFQSALAFMNMNTKKGSNNKIVDAVLVEAVSNISQKDAAGTLLNSISKTKLRYYKIKN

SEQ ID NO: 118 - protein, 398 aa, synthetic construct
  REGION 1..398: note = pYY-BEM4.9; tr|A0A0P4WGY5|A0A0P4WGY5_9EUCA polypeptide sequence
MEENSSATSQPKCASRTKQGGNDLSTDMSNLSVGETKRTDFLPWDDYFMAVAFLSAMRSKDPSSQVGACIVNADKKIVGIGYNGMPIGCSDDELPWNKESLDPLQTKYMYVCHAEMNAIMNKNSSDLAGCCVYVALFPCNECAKLVIQAGIREVVFFSDKHQQKPETVASKKMLNMAGVAYRQYTPSQSKIELNLSLKEQEKSEPTADITQSSERDQNSKRKDYLSWEEYFMAMAHLSALRSKDPITQVGACIVNSKKKIVGIGYNGMPLGCNDDLMPWGNSSSNKLETKYMYVCHAGVNAIMNKNSCDVSGCTLYVALFPCNECAKVIIQAGIKTIIYASDTNKDQASILASKKMLDMAGIKYRADNLSQRKIVIDFKTIDWNSRFMNDHQNDPTCL

SEQ ID NO: 119 - protein, 259 aa, synthetic construct
  REGION 1..259: note = pYY-BEM4.10; tr|A0A3D8IG27|A0A3D8IG27_9HELI polypeptide sequence
MRKNILYFILTLFFLSGLYATSLPEDNVVSGVIYEKIDTVSAEVDHIYPMLALAIVYKDWQEKNMLNKQGHNIGLVIVDENNMPVFWVRNSVHATHNGTQHGEVRLVSNLLNCEGFNKYLDKYTLYTTLEPCIMCAGMLSMVQIPKVVYAQKDLSCGNTQEIISTAKYPRYYKAFTVENGYKKDLEECFEQYKICKNDSITDFLVNDSAKEIFRKASNDLQDYKVKFKENRRVIKVAQEFLQNIQTKDNLDVLQCPKNM

SEQ ID NO: 120 - protein, 256 aa, synthetic construct
  REGION 1..256: note = pYY-BEM4.11; tr|A0A351C8C4|A0A351C8C4_9BACT polypeptide sequence
MNELTKQSEHLRNEALRIATRSYVPYTGQQEGVIILLENGDLIPGVRVENASFQLTIPALQNALSTMYALQRTDISMIVSSIPFTDSDLAYTGGMAEIAWEMVGASLLLVAGAHIPEAGTFIDPARGENLLDVSREAALNAFIPESDFPVGSAIQTSDDVVIDGCNVEHSDWSKIICAERNVLSTARSYGLGQITTIYVSCPKEPGGTPCGACRQVIVELAPDATVWMDRGNQEPIAMKATKLLPGHFTGNVLKKQ

SEQ ID NO: 121 - protein, 301 aa, synthetic construct
  REGION 1..301: note = pYY-BEM4.12; tr|A0A1G6V2K7|A0A1G6V2K7_PEPNI polypeptide sequence
MPIVRVNEIGARLPEDWEALETAIWQAYVSREDLPDAGELDLTLVDDATIQELNKTHRQLDKSTDVLSFPMYDDRDDLAADVQAGLPVILGDIMISVPTAERQAQAYGHSFKREMAYLLVHGLLHIAGYDHMSAEEKSAMRRAEEAILADVDVPRDTAPSKTAAVLDEADVQALIDAARAARLQAYAPYSGYAVGAALLAADGRRFCGVNVENASYGATCCAERTALFAAVTAGARDFIALALVTEGDEPAPPCGLCRQALAEFSPDLAIYLAGPTGETYRRTSLAALFPEAFSLSTKESV

SEQ ID NO: 122 - protein, 528 aa, synthetic construct
  REGION 1..528: note = pYY-BEM4.13; tr|F2NP91|F2NP91_MARHT polypeptide sequence
MPVMETHALEARFKEALARLCPEGRLLAAVSGGGDSVALLYLLKAAGRDTIVAHLDHALRPDSAADAAFVEKLAQRLGFPLETEHVDVRALAHRKRINLEAAAREVRYAFLARVARRWKARCILTAHTLDDNAETVLLQILRGAGRGLGIRPLQRRVARPLLEFSRAELRAYLEARGARWLEDPTNRSLELDRNYLRHAVLPRITARFPHALEALARFSQAQQADDWALEALSARHLIPDRRWPVPAYRALPLERAPEALRRRAIRGVLEALGVRPEARLVADVEAALGGRAQTLPGGVVVRRQRGTLFFIPPTVRFPKVQPPAGLEARPPRPGDYLVFPYGRKRLVDFLNERGVPRELKRRWPVGAVGAEVRWVYGLWPEPDEDRYMRRALVLARAAARQGEVPIGAVLVRDGAVLAEAANAVEASRDATAHAELLALRTALRRVGEKVLPGATLYVTLEPCPMCYGAILEARVARVVYGVENLKAGAFTVHGLEPRVALEAGRVEGECAKVLKDFFARLRPGRDGA

SEQ ID NO: 123 - protein, 226 aa, synthetic construct
  REGION 1..226: note = pYY-BEM4.14; tr|A0A316TX77|A0A316TX77_9BACT polypeptide sequence
MINGYTPYSGNQNTCYVKGESGTFYPGVRIENVSYPLTISSVQAAVCSCLANSDNPVEYYTGDHQPELLQVWADEYDMKPGGKLPDSPLKLFDPLVPSIPDIKKELDVLTEKSVTPNSGFPVSALLQTEKGYIRGVNIELSSWALGLCAERVAISRALTAGYTQFKSIHIYAPEADFVSPCGACRQVLLEVMPDADTELYHGDGTLSKHIVSDLLPFGFTSHKLKK

SEQ ID NO: 124 - protein, 321 aa, synthetic construct
  REGION 1..321: note = pYY-BEM4.15; tr|R6VYG3|R6VYG3_9FIRM polypeptide sequence
MIHKGTQTIETKRLILRAFTPDDAEAAFENWMSDPKVTEFLRWKTHADISDSRKIVNEWANGSADPEFYQWAIVPKDVNEPIGTISVVDRNDALGIFHIGYCIGSKWWHKGITSEAFSAVIHFLFEEVGANRIESQHDPENIHSGDVMKKCGLTFEGTLRQADFNNRGIVDACVYSILQSEWQNNTSVWQRLYNAALTVQNDRVVSPFIDAGGVAAALMTKKGNIYTGICIDTASTLGMCAERNAVANMLTNGESRIDKIVAVMPDGKVGAPCGACREYMMQLDRDSGDIEILLDLETEKTVRLKDLIPDWWGAERFGDTE

SEQ ID NO: 125 - protein, 229 aa, synthetic construct
  REGION 1..229: note = pYY-BEM4.16; tr|A0A3C1HZ18|A0A3C1HZ18_9BACI polypeptide sequence
MGDIMENWNELSEPWKRCFLQAWKAYCHGSIPIGAVLVDSEGEIFLEGRNRVHELTAPEGQLCDCRIAHAEMNVLVQVKTSDYEKLSGATIYSTMEPCIQCFGAIILSRIKNISFAAIDDKLAGATTLEDRHGFIKSRNLNIAGPFSHLGEIQIILRTDFLLRIFDSEYADPLIAAHEKDYPIGVALGRHYHRNNRLQVAKKETIPFGELFNEFSFDIKRAREGYTLGK

SEQ ID NO: 126 - protein, 205 aa, synthetic construct
  REGION 1..205: note = pYY-BEM4.17; tr|A0A1M6KV24|A0A1M6KV24_9BACT polypeptide sequence
MEASQQNILLKIEGKGPVAEINFTVTLPEWLVEQVQSGSTVFLTQKEKMRFVLELARKNVAQETGGPFAAAVFSLESGELVSAGVNVVVESRCSSAHAEVVALSLAQKAVDSHDLGAAGLPRMVLVSSAEPCAMCMGAIPWSGVKQVICGARDEDVRSVGFDEGAKPLEWVEDFAERGIEVIRDVLREEATEVLWDYRERGGEIY

SEQ ID NO: 127 - protein, 207 aa, synthetic construct
  REGION 1..207: note = pYY-BEM4.18; tr|A0A2U0T9B4|A0A2U0T9B4_9RHIZ polypeptide sequence
METAELISRLLDVIEKDIAPVTAKGVARGNKLFGAAILKKSDLAVIVAETNNEIENPLWHGEMQAIKRFFELPADQRPATRDCLFLATHEPCSLCLSGITWSGFDNFYYLFSHQDSRDGFAIPYDIQILKSVYAVPEPETGTVSPARDLYNRSNDFWTSHGLQDMIAGLARSNREALLARIDDLNALYAELSERYQRDKGGKGIPLP

SEQ ID NO: 128 - protein, 231 aa, synthetic construct
  REGION 1..231: note = pYY-BEM4.19; tr|A0A2K9PN08|A0A2K9PN08_9FLAO polypeptide sequence
MSDKKESKIKISKTSESIELDEIHSLLSYSIVQKFWENDDRNGRGYNVGVILVDENKNIVDWDINSVNKTENSTQHGEMRLISRYLDKDELYSLKGYTMYPTLEPCAMCAGMMTMTNVYRTVNGQMDYFYSKALERLSIDTRECGGYPPYPRTVISEISPSSISTRLDAEYKQYTNAGNKPIITKFLSTYKAKTIYDDAFNQFINFKCKFPENKTKYENAIKFYNSLPESI

SEQ ID NO: 129 - protein, 330 aa, synthetic construct
  REGION 1..330: note = pYY-BEM4.20; tr|F4PWM7|F4PWM7_CAVFA polypeptide sequence
MRFSLSLLFVILSVLLAGVLACKDPYNPETVDYGQCASATKANYEVRSDSKVLTPADLPADELAVHESRMRHIIDIARVNNKKFVSSIYFPNGTLACIGINTGKPNMIAHGEIVAIQNCTEIHGISMYTNYSIYTTGEPCSMCASAILWSRFKTVVWSTYNSDLYCKICMSNIPIDSSYIFSRAYGLGIEAPVAIGGVVKAEGDAWFGTYCNRPTSIYYIAPKCACQDPAKVSPLKFTQTRTTVWVEGGDKVVTQWNAIISNPSNSTIVDPPIVISPSVVFKGAPWGISAASEPNTYKLSYNKVLFPGQTFSFGYSVYGLEEVAFTALEA

SEQ ID NO: 130 - protein, 193 aa, synthetic construct
  REGION 1..193: note = pYY-BEM4.21; tr|U7QZM1|U7QZM1_PHOTE polypeptide sequence
MNKTRRKLLATLGIMSISMSFIAQAGEKKTQVINNILSKQEITEHEKYMREAIKEAIKNPKHPFGAVIVNRNNGEILSRGVNTGRNNPILHGEIQAINHYITQYGNQGWENVALYTTGEPCSMCMSALVWIGIREVIWATSISVIRNSGIRQIDISAHEIAERASSFYNPITLVGGILANETDKLFLERKRGN

SEQ ID NO: 131 - protein, 319 aa, synthetic construct
  REGION 1..319: note = pYY-BEM4.22; tr|A0A081CH48|A0A081CH48_PSEA2 polypeptide sequence
MASRRHLLATQVTGNHRKLSLWHLRGWLSPYTKLVDAVYFLTTNSFYHSLQTPPVQSITMLLSSIITSLALAAQASAYREGLHPEFQSGLSINSVPATDRDHWMRLANSAIYYPPVSHPCPQAPFGTAIVNTTSNELICAIANRVGSTGDPTQHGEITAIQHCTNVMRKKGLSPQEIIAAWKQLSLYTNAEPCTMCLSAIRWAGFKEVIYGTSVGTISENGRNQIYIPSNLVLEKSYSFGHATLMLGNILTHETDPFFQHQFNESAPCPVGCERTQVGEARVKTCEPVPNWQKLVRLEYSEDSRVGSEPVAHTPLHLEL

SEQ ID NO: 132 - protein, 203 aa, synthetic construct
  REGION 1..203: note = pYY-BEM4.23; tr|A0A3D3HMU1|A0A3D3HMU1_9GAMM polypeptide sequence
MDYSDAILGAITSIRRNSKQPGVNVTDNVTDSSTQYNNDEYWMRRALALAREAGEAGEIPVGAVLVKDNQQVAGGFNQPIRSHDPAAHAEILTLREAGAVLGNYRLIDTTLYVTLEPCMMCAGALVHSRIKRLVFGAAEPKTGAAGSFIDLLTLPRLNHYMEVTGGVLGEECSVLLSDFFRRRRAEKKALKRQNSESGSDSAS

SEQ ID NO: 133 - protein, 270 aa, synthetic construct
  REGION 1..270: note = pYY-BEM4.24; tr|A0A1N5WT13|A0A1N5WT13_9ACTN polypeptide sequence
MLEKIERRLVAAAEAVVRSPSTGDAHTVAAAAMDANGDIYSGVNVFHFTGGPCAELVVIGSAAAANAPPLITIVAVGDGDRGVIAPCGRCRQVMLDLHPDVFVIVPTGDGQLAAKPVRELLPFGYVARTGSTAPRVVYFHPRHYDTISSGLKTATVRFQDSVQTGPAVFVFDDGESIRRLDAVVEKVESRRLDHLTEEDAHHEALPDSDALRDAIKTQYPMLGDGDVVDVATFRLTAISAPDPDPRSSYPPAVSRCNPAGPRADLLVGQS

SEQ ID NO: 134 - protein, 257 aa, synthetic construct
  REGION 1..257: note = pYY-BEM4.25; tr|X0SAC5|X0SAC5_9ZZZZ polypeptide sequence
MTKDGRVIASAHDTEVTDQDSTAHAEINAIRKASKIYRKDLTGCLIISTHEPCPMCTGSIIWSNISKVVYGVSIRDSIKAGRDMINLSCKEIIKKPNAEINIYDGILKKECLKLYNNDTRKLVKKFRKYEWINIEENLLNKRMQWFENNKTMIRKLKGNDLEKAYHLILMKIGIKRSEAPIVKKSESKIIFHSKNYCPSLEACIILDLDTREVCKEIYERPTEELIRRLNSKLRFTRNYDCIRPYSDYCEEIIILEK

SEQ ID NO: 135 - protein, 154 aa, synthetic construct
  REGION 1..154: note = pYY-BEM4.26; tr|A0A3B8IC10|A0A3B8IC10_9BACT polypeptide sequence
MPSHEDFIHQCLELGKEALLQGNPPVGSVIVWQDQVIGRGIENGRSSGDITQHAELLALQEAVATGQRDKLKEAIIYSTHEPCVMCAYPIRQYKIPTVVYSVAVPELGGHTSSWHLLTTEDVPKWGKAPKIITGISAEEVEALNAAFQDSLKKG

SEQ ID NO: 136 - protein, 180 aa, synthetic construct
  REGION 1..180: note = pYY-BEM4.27; tr|A0A2N9P8B9|A0A2N9P8B9_9FLAO polypeptide sequence
MFIFKLISPPVSIEVYQDKIIQKLYICFMENIFTDEYFMKKALQEAETAFQQGEIPVGAVIVIDNRIIARSHNLTEMLNDVTAHAEMQAITASANFLGGKYLKDCTLYVTLEPCQMCAGALYWSQISKIVYGATDEQRGYRAMGAQLHPKTKVISGIMQNECTHLMKDFFKQRRSKSTKD

SEQ ID NO: 137 - protein, 178 aa, synthetic construct
  REGION 1..178: note = pYY-BEM4.28; tr|K1KX30|K1KX30_9BACT polypeptide sequence
MVKNPVNNNELYFGKHSEIPMNEEQKAYMKMAVDLSRSGMESGKGGPFGCVIVKDGKVIGIGSNSVLETNDPTAHAEIVAIRDACRNLGHFQLDGCEVYTSCEPCPMCLGAIYWARPSKVFFANDKRDAAEAGFDDDFIYQELELPYEKRKIPFEQGMQDTAKEVFQEWILKEDKTLY

SEQ ID NO: 138 - protein, 196 aa, synthetic construct
  REGION 1..196: note = pYY-BEM4.29; tr|R4XI84|R4XI84_TAPDE polypeptide sequence
MSSEIEPPSTDVHKHAVAEAADESGAADAFMQIALQQAETALLNKEVPVGCVFVHQPTGTVLATGANQTNASLNGTLHAEFVAIESILRDHPPSIFRESDLYVTVEPCVMCASALRQLQVRKVYFGCGNDRFGGCGSVFSIHSDASKTGDAAYMVESGIFRKEAIMLLRRFYLLQNESAPKPALKSTRVLKEHFDE

SEQ ID NO: 139 - protein, 212 aa, synthetic construct
  REGION 1..212: note = pYY-BEM4.30; tr|A0A239CVF7|A0A239CVF7_9DELT polypeptide sequence
MSPASKKHFPSLFSFLLLTIGLICGTAHAQPQGHTADDTAATLANASLKEHEPFIRRCYQLAIDAGKKGNHPFGALLVHKGKIVLEAENTVLTDNDFTNHAEMNLIAEAARTLSRQIIPEATVYTSCAPCAMCTATLAMAGFTRIVYGVSHDALNKRFGLKGKSVSCPALFKTMGMELEFVGPVLEKEGLRVFDFWPEKDPHAQMLKKQARK

SEQ ID NO: 140 - protein, 320 aa, synthetic construct
  REGION 1..320: note = pYY-BEM4.31; tr|A0A1Q3NME1|A0A1Q3NME1_9BACT polypeptide sequence
MTEFNYDWAKLAFSSKRPLTNLKATFIIAPREISEKRFTQLLKEYLPKGDILLGISKEDYVEGLEGQPQFAMLQQKTLQKLIDKVNDASAHKVYTLRYFQRELPAIIEKLTPPRVVGIHGSWHHSFHTLPIYYLLSEKRIPYQLVAAFSDEDEARAYEVATDKKIVRPTLEGSFDDTTVLQLTDEVAKSSYDYGFQTGAILAEKVNGVYQPVAAGFNKVVPYQTYALLNGASRETNFSPANDMNHYDTIHAEMQILVEAAKQGISLKDKTLFVNLMPCPSCARTLSQTELSEIVYRIDHSGGYAVDLLTKVGKDIRRIVY

SEQ ID NO: 141 - protein, 180 aa, synthetic construct
  REGION 1..180: note = pYY-BEM4.32; tr|A0A2G6N4N7|A0A2G6N4N7_9DELT polypeptide sequence
MKERTVSYSDRHFMAEALEMAESALTQGEFPVGCVIADGTAVVARGHRTGTTAGAVNEIDHAEINALRHLGLAGEHLDRTDLTIYSTMEPCLMCFAAIVLSGINRIVYAYEDVMGGGTGCDLTGLPPLYRDAPLTLVAGVRRRASLNLFRRFFTDPENGYWAGSLLSRYTLNQTKDSHRL

SEQ ID NO: 142 - protein, 156 aa, synthetic construct
  REGION 1..156: note = pYY-BEM4.33; tr|A0A0G0RBB8|A0A0G0RBB8_9BACT polypeptide sequence
MQSVQYNKLTHLQRRALDEAEQVLENSYNPYSHFYVGACLISEDEQLIAGTNFENAAYGSAICAERAAVLRANAMSIRRFRGIAIIARGEDFNTTEVTGPCGSCRQVLYEISQVSGCDLQVILATSKKDKIVITTIRELLPLAFGPLDLGVDIGKY

SEQ ID NO: 143 - protein, 217 aa, synthetic construct
  REGION 1..217: note = pYY-BEM4.34; tr|A0A327L2Q5|A0A327L2Q5_9RHIZ polypeptide sequence
MVTSRDGEDEAMMARCVALSRIAVGKGEYPFGAVVAREGRIVAEAINRTIRDGDVSRHAEVIALARAQKAIGRRELRECSLYSNVEPCAMCSYCIREAWVGRVVYALGSPVMGGVSKWNILRDDGLSGRMPQVFDAAPEVVSGVLVEQAQAAWRDWSPLAWEMITLRGLMTDPSARPECRTRAARPRSLWHHLVALIERPPRPYVDPTSAAEGHADL

SEQ ID NO: 144 - protein, 162 aa, synthetic construct
  REGION 1..162: note = pYY-BEM4.35; tr|S2DR30|S2DR30_9BACT polypeptide sequence
MKMKKKIEITVSLEVIQKSEWSKEDRSLIERAIHAVEHAHAPYSNFMVGTALLLDNGQIFSANNQENVSFPVGICAERAVLSYAMGNFPNNRPVKLAVVAKRRSDSTWATVTPCGLCRQTINEYEVKFGHPIEILMLNPGEEILKASGIDQLLPFRFNDLNS

SEQ ID NO: 145 - protein, 153 aa, synthetic construct
  REGION 1..153: note = pYY-BEM4.36; tr|A0A369QGF1|A0A369QGF1_9BACT polypeptide sequence
MEEHEKWMHWCLNLAQQALQQGDFPVGAVVVQKGKLIGQGVEAGQLKKDITCHAEMEAIRDARQTINTADLQNCILYSTHEPCIMCSYVIRHHKISRVVVGTTVPEVGGSSSAYPLLSAPDISIWVAPPHLVTGVLAEACQALSQAYKQKFKK

SEQ ID NO: 146 - protein, 159 aa, synthetic construct
  REGION 1..159: note = pYY-BEM4.37; tr|A0A1W6X4U4|A0A1W6X4U4_9RHIZ polypeptide sequence
MTNPSRQERWDRRFLELAKVFGTWSKDRSAGTGCVIVGPDRLLRASGYNGFARGIDDEVPERHERPAKYSWTEHAERNAIYNAAKLGISLDGCTAYVNWFPCIDCARAIVQAGIVRLVGLHPDHADQRWGSEFKFATEMLRESGIEIILYDIPELAARK

SEQ ID NO: 147 - protein, 490 aa, synthetic construct
  REGION 1..490: note = pYY-BEM4.38; tr|A0A238BW09|A0A238BW09_9BILA polypeptide sequence
MEEMARKIRTKAKKANSYCNTMTFLISKASIVLLKAECKRIELTVVIFRFLIKMNASEPNNELCDMTVIKSMLKITHVIFDLDGLLIDTEVVFSKVNQCLLSKYNKKFTPHLRGLVTGMPKKAAVTYILEHEKLSAKVDVDEYCKKYDEMAEEMLPKCSLMPGVMKLVRHLKTHSIPMAICTGATKKEFEIKTRYHKELLDLISLRVLSGDDPAVKRGKPAPDPFLVTMDRFKQKPEKAENVLVFEDAANGVCAAIAAGMNVIMVPDLTYMKIPEGLQNKINSFSDNLIISNDLNVALMSLKKELSEEEVHFLNRAFEIAVDAVLNNEVPVGCVFVFEGQEVAFGRNDVNRTKNPTYHAEMVALKMMKQWCMDNGRDLEEIMRRTTLYVTLEPCIMCASALYHLRLKKILYGAANERFGGLVSVGTREKYGAKHFIEIMPNLSVDRAVKLLKEFYEKQNPFCPEEKRKVKKPKKSGNNNDNSDDAVALNV

SEQ ID NO: 148 - protein, 159 aa, synthetic construct
  REGION 1..159: note = pYY-BEM4.39; tr|A0A1J5H6Z0|A0A1J5H6Z0_9BACT polypeptide sequence
MAYQPSEKFMQMAIDKTREGVLSGQTPFGACIVKDGKVVACEHNTVWQDTDITSHGEVHTIRAACKAIGSIDLSGCILYSTCEPCPMCFSAIHWARIDTVVYGAFIADAQDAGFNELTISNEKMKEFGGSPVNFISGFMRDENVALFKLWKEQGANNVY

SEQ ID NO: 149 - protein, 168 aa, synthetic construct
  REGION 1..168: note = pYY-BEM4.40; tr|A0A3C2D945|A0A3C2D945_9BACT polypeptide sequence
MKTTEIRIIVHEYQNIDELTENDQYLLHEARRITEFAYAPYSGFHVGAAILLGNGMIVKGNNQENSAYPSGLCAERVALFYANANYPDSEVKTIAISAAKNGILVNDPIKPCGGCRQTLSEAEVRFGSPIRIILDGQDSILVLHGVESLLPLSFSKKDLASPLAATGR

SEQ ID NO: 150 - protein, 214 aa, synthetic construct
  REGION 1..214: note = pYY-BEM4.41; tr|A0A1I7EYS3|A0A1I7EYS3_9BURK polypeptide sequence
MKFKLDPSRPPDEDDYYLGVALAVRRKANCTGNRVAAVIVKNKRVIATGYNGVPEDMPNCLDGGCLRCSNPGGQFKSGTRYDLCICVHAEQNALLTAARFGISVEGAHLYTTMQPCFGCAKEILQAKIEKVFYLHPWVPTDVDPVMDAAMKAEYAKIIGKLKVKKLDFDDPVATWAVTTMRQAALASDKNPDKKTPPKTAKKKVAKKKSRTSPR

SEQ ID NO: 151 - protein, 155 aa, synthetic construct
  REGION 1..155: note = pYY-BEM4.42; tr|H8GQX8|H8GQX8_METAL polypeptide sequence
MNHEHFMRRAIELARQAPQYPFGAVIVRRDDGQCVGQGFNRSDLNPTYHGEMVAINDCAVRHCAEDWRGFDLYTTAEPCAMCQGAIEWAGIGRVFYGTSIPYLQKLGWWQIDLRAAEVSARAVFRDTLIVGGILETECNALFAAARRGCFGTGSE

SEQ ID NO: 152 - protein, 156 aa, synthetic construct
  REGION 1..156: note = pYY-BEM4.43; tr|A0A0S8HZN3|A0A0S8HZN3_9CHLR polypeptide sequence
MDEHDIRFLRASFDVARNARKNGNHPFGALLVDEHGRIVMEAENTVITAKDCTGHAETNLMREASSKYDSDFLANCTIYTSTEPCPMCAGAIFWSNVRRVVYGLSEESLYEIAGRGSEEVLFLSCREIFERGKKLIEVIGPLLEDEAREVHMGFWR

SEQ ID NO: 153 - protein, 193 aa, synthetic construct
  REGION 1..193: note = pYY-BEM4.44; tr|E3SF31|E3SF31_9CAUD polypeptide sequence
MKPTTVLQIAYLVSQESKCCSWKVGAVIEKNGRIISTGYNGSPAGGVNCCEHAEEQGWLLNKPKPVLIPGHKSECVRFSQVDRFVLAKAHREAHSAWSKNNEIHAELNAILFAARMGSSIEGATMYVTLSPCPDCAKAISQSGIKKLVYCETYDKNIPGWDDILKNAGIEVFNVPKRSLDKLNWENINEFCGE

SEQ ID NO: 154 - protein, 330 aa, synthetic construct
  REGION 1..330: note = pYY-BEM4.45; tr|F8AAC6|F8AAC6_THEID polypeptide sequence
MIRAPWHEYFMLLAKIVALRSGCNSRPSGAVIVKNKRILATGYNGPMPGAWHCTDRGPGYCFRREKGIPDIDKYNFCRATHAEANAIAQAARFGISVEGASLYCTLAPCYVCLKLIASAGIKKVYYEHDYGSRDFERDQFWKEAIKEAGLEKFEQITVSQEVMEQLQEILPYPTSKRRLAPTEFLDEFEDGKKYGVPSIEVLFNKLNYLTRQALKDITFVIEKTTVTEEPEGISFYLSGKMVELSELINTVKKQINADQNFYFLAKHNAIEAKIEILREAENIRLKAFLNECPLESFKRIAESLDYILYQVSNSLSLPTRLELSVNLLRI

SEQ ID NO: 155 - protein, 158 aa, synthetic construct
  REGION 1..158: note = pYY-BEM4.46; tr|A0A2H4ZNK4|A0A2H4ZNK4_9EUKA polypeptide sequence
MKKQLSRKIQEEWMSRLLRNAYDAGTYGEVPIAAVILNESGQCIGWGRNCREKDQNPLGHAEIIALRQASYLKKSWRFNECTMLVTLEPCPMCAGALLQARINHIIYGASDYKRGGFGGVLDLSKNSSAHHKIEITRGVKSIQSCQLLETWFRRRRRV

SEQ ID NO: 156 - protein, 176 aa, synthetic construct
  REGION 1..176: note = pYY-BEM4.47; tr|A0A239N5N1|A0A239N5N1_9PSED polypeptide sequence
MEGRAGIIPFDEGGAAMGPAEEDSPMQHLAYMREALALARANVEAGGRPFGAVLVRDGEVIARAANGTHLDHDPTAHAELLALRAAGRALGSPRLDGCVVYASGHPCPMCLAAMHLSGVSAAYYAYSNADGEPYGLSTAAVYAQMAQPVEWQSLPLQALRPEDEEGLYGFWRERRP

SEQ ID NO: 157 - protein, 199 aa, synthetic construct
  REGION 1..199: note = pYY-BEM4.48; tr|A0A328VTR2|A0A328VTR2_9PSED polypeptide sequence
MHPEHLALLQQAPASTHADDTWARLCCEQALLAVEEGCYAVGALLVDGAGELLCSGRNQVFAPAYASAAHAEMRVLDQLEAEHAQVDRRSLTLYVSLEPCLMCYGRILLAGITRVRYLARDRDGGFALRHGRLPPAWANLASGLSVVQAKADPYWLDLAEHAIGRLQDRQTLRQRVIRAWRGQRTLTDEFSSTKRTHSG

SEQ ID NO: 158 - protein, 402 aa, synthetic construct
  REGION 1..402: note = pYY-BEM4.49; tr|A0A103YG48|A0A103YG48_CYNCS polypeptide sequence
YIRELHASSLRRDEHEIQNPKILVIVDRLSSPSLHVSLSLSLSLVIFPPFIPLNQTPTHMENAKVVEAKDGTIAVASAFSGHQEVVQDRDHKFLTRAVEEAYKGVECGDGGPFGAVVVHKDEVVASCHNMVLKHTDPTAHAEVTAIREACKKLNKIELSDCEIYASCEPCPMCFGAIHLSRIKRLIYGAKAEAAIAIGFDDFIADALRGTGFYQKAHLEIKQADGNGAMIAEQVFEKTKAKFAIDHKFLTRAVEEAYKGVECGDGRPFGALVVHKDEVVVSCHNMVLNYTDPTAHAEITAIREACKKLNRIELSDCEMYSSCEPCPMCFGAIQISRIKRLVYGAKAEASIASGIPIGDFISDALKGTGFHEKANFEIKQADGNGAMIAEQVFERTKAMFPKR

SEQ ID NO: 159 - protein, 195 aa, synthetic construct
  REGION 1..195: note = pYY-BEM4.50; tr|W5M1M8|W5M1M8_LEPOC polypeptide sequence
NSSTRESRVMAQMEINGGASPPKKPGKGQSAADQDMITGLINKALQAKEFAYCPYSNFRVGAALMTNDGRVFTGCNVENACYNLGVCAERTAILKAVSEGYESFRAIAVSSDLQDQFISPCGACRQVMREFGTGWDVFLTKVDGSYVRMTVDELLPMSFGPDDLKKKKVFSLQNGHEVSTQFYTHSPCEAGENNN

SEQ ID NO: 160 - protein, 134 aa, synthetic construct
  REGION 1..134: note = pYY-BEM4.51; tr|A0A3N5YPZ2|A0A3N5YPZ2_9ALTE polypeptide sequence
MSNSETEHIQALVDAAQAAQKQSYSPYSSFQVGAAIFADDGNTYSGCNIENVAYPLGQCAEATAIGMMIMQGAKRIEDIMIASPNDQVCPPCGGCRQKISEFGTAETKIHMVTRSGEVSTVTLGELLPLAFDSL

SEQ ID NO: 161 - protein, 162 aa, synthetic construct
  REGION 1..162: note = pYY-BEM4.52; tr|A0A2A9NC86|A0A2A9NC86_9AGAR polypeptide sequence
MTNSTLSNEDRTRLIQGAFQARKKTYSPYSNFPVGAALLTTDGRIIEGANIENASYGGTICAERTAIVKAVSDGYRHFAGIAVTTKMPTRVSPCGICRQVLREFCSLDMPVLLVPGDYPQRNPVDDDGADKPGVITEGGVRETTLGALLPDSFGPENLPPRA

SEQ ID NO: 162 - protein, 163 aa, synthetic construct
  REGION 1..163: note = pYY-BEM4.53; tr|A0A2D6RD43|A0A2D6RD43_9GAMM polypeptide sequence
MNIENLITENDETLIRRCIELAGESVKNGDKPFGALLAKDGNIIFESSNNAKTKVPYHAEILTLMDAQDKLNTTDLSDYALYSNCEPCPMCSFMIREYKLDKVVFSVHSPYMGGQSRWNILEDDVLTRFKPYFSKPPNVVGGVLESEGKRIFDKVGLWMFGKE

SEQ ID NO: 163 - protein, 204 aa, synthetic construct
  REGION 1..204: note = pYY-BEM4.54; tr|A0A0H3AVL6|A0A0H3AVL6_BRUO2 polypeptide sequence
MHAKGYSQQERRIIPFANRFRFRELCSNKSLHGLRAKFPEQYTKWDPMRKAASITKANSATPMDIALEEAHAAGERGEVPIGAVIVRDGEIIARAGNRTREFNDVTAHAEILTIRQAGEMLGSERLIDCDLYVTLEPCAMCAAAISFARIRRLYYGASDPKGGGIEHGGRFYTQPTCHHAPEIYPGFCEADARKILKDFFREKR

SEQ ID NO: 164 - protein, 165 aa, synthetic construct
  REGION 1..165: note = pYY-BEM4.55; tr|A0A242H531|A0A242H531_9ENTE polypeptide sequence
MFIVKNNIEVIQQQAELDAKFMKQALKLAKDASNNGNEPFGAVLVKNDKVILTGENQIHTESDPTYHAELGIIRDFCTSQKITDLSEYTLYTSCEPCCMCAGAMVWSNLDRMVYGLGHDELAEIAGFNIMIGSEEIFSKSPNRPEVAKGVLKEAAVPVYVDYFQR

SEQ ID NO: 165 - protein, 181 aa, synthetic construct
  REGION 1..181: note = pYY-BEM4.56; tr|A0A2R6XZE2|A0A2R6XZE2_9BACL polypeptide sequence
MSGRISWHEYFMAQAKLIALRATCTRLMVGAVIVRDRRVIAGGYNGSIAGDEHCIDVGCKVRDGHCIRTIHAEQNALMQCAKFGVSTDGAELYVTHFPCLNCTKLLIQAGIRHIYYEVPYRVDPYAIELLEKAGVGTTQITVDLNAYVQVMSKVSTDPALTYVPESKAQKDEYGQSVGKIV

SEQ ID NO: 166 - protein, 173 aa, synthetic construct
  REGION 1..173: note = pYY-BEM4.57; tr|A0A139SHT6|A0A139SHT6_9BACT polypeptide sequence
MSEANASSESLPSRNSPVELIAEAAGKFGRRPTWDEYFMATAVLISTRSSCERLNVGCVIVTAGESHKNRIVAAGYNGHLPGSPHTSRMRDGHEQATVHAEQNAISDAARRGSSVEGCTAYVTHYPCINCAKILASAGIAKICYRLDYHNDPLVKPMLAEAGIEIVQLGEAAS

SEQ ID NO: 167 - protein, 170 aa, synthetic construct
  REGION 1..170: note = pYY-BEM4.58; tr|A0A261DBH2|A0A261DBH2_9RICK polypeptide sequence
MVMKKKLITVKRSTEFNNFFMEEALKQAQFALDKNEIPVGAIIVNRITNKVIAKAHNIVEQTKNPVLHAEIVAINQSCQILSSKNLSDCDMYVTLEPCVMCSGAISFARIGRLFYAANDPKQGAIENGGRFFNSKSCFYRPEIYSGFSAKISENLIKEFFYNVRYQKCNP

SEQ ID NO: 168 - protein, 146 aa, synthetic construct
  REGION 1..146: note = pYY-BEM4.59; tr|A0A2N0XZK6|A0A2N0XZK6_9VIBR polypeptide sequence
MTDNSLHESYMRQAFELSKSALPGCRPNPPVGCVFVKDGEVVSSGFSQPPGNHHAEAGAIAAYTGSYDGLVAYVTLEPCSFQGRTPSCAKALVRVRPEKVYVAILDPDTRNSGAGIKILEDAGIDVEVGLLGEEVASFLNPYLIRN

SEQ ID NO: 169 - protein, 159 aa, synthetic construct
  REGION 1..159: note = pYY-BEM4.60; tr|A0A1V5R0F9|A0A1V5R0F9_9BACT polypeptide sequence
MTKKETTKLHALDDFCMKKALLLAKRAFRADEVPVGALVVDSSNKVIGRGYNQVEKRKSQRAHAEQLAIEQACKKIGDWRLEGCTLYVTLEPCTMCMGLIKLSRIERVVFGAASPLFGYQLDKNRKSQLYKKGVIKIRKGVGKATAAALLKDFFKNKRM

SEQ ID NO: 170 - protein, 167 aa, synthetic construct
  REGION 1..167: note = pYY-BEM4.61; tr|A0A2W0H8Y3|A0A2W0H8Y3_9BACI polypeptide sequence
MKNNGRLDHEYFMTEALQEAKEAGQRGDLPIGAVIVHNGRIIARGSNMRKTAGIKISHAENNAMHNCAPYLMKHASECVIYTTLEPCIMCLTTLVMANIDSIVFAADDKYMNMKPFIDANSYIRDRIHQYKGGVCRGESEALLRKYSPYAAELALNGTHPHHRKGGA

SEQ ID NO: 171 - protein, 165 aa, synthetic construct
  REGION 1..165: note = pYY-BEM4.62; tr|A0A261BDB7|A0A261BDB7_CAERE polypeptide sequence
LYKLYIFRMTTTKANLTQFEQELVDKAVGAMEKAYCKYSGFKVGAALVCEDGEIIIGANHENASYGATICAERSAMVTALTKGHRKFKLLAVATELEAPCSPCGICRQYLIEFGDYKVILGSSTSDQIIETTTYGLLPYAFTPKSLDDHEKEAEERNHQEGEKKH

SEQ ID NO: 172 - protein, 162 aa, synthetic construct
  REGION 1..162: note = pYY-BEM4.63; tr|A0A2E1PHI6|A0A2E1PHI6_9GAMM polypeptide sequence
MKELLIHSWLMLNSNSKLIMERVIELSEINLKNGKIPIAAVIVDKKNYEIISESQNEDSPIGHAELLAITKALKKLNTNRLDSTNLFVTIEPCPMCAYAISKCHINRLYFGSEDEKGGGVINGPRIFESHNLKKIDYVSHCYHEKTTQLMQSFFQLKRNQQL

SEQ ID NO: 173 - protein, 133 aa, synthetic construct
  REGION 1..133: note = pYY-BEM4.64; tr|A0A378LUA7|A0A378LUA7_9GAMM polypeptide sequence
MDTIIKKMISNAHNTLAHSYSPYSKFSVASCICTDKDNFYTGVNVENSAYGLAICAETSAISAMVTAGEKRIKSMVVMAGTNILCSPCGACRQRIYEFSTPDTLIHLCDKNSILRTFKINELLPEAFKFDFNP

SEQ ID NO: 174 - protein, 370 aa, synthetic construct
  REGION 1..370: note = pYY-BEM4.65; tr|A0A139HQ78|A0A139HQ78_9PEZI polypeptide sequence
MADSLKSKPGHARHDTALIHGLSQSDVQKLSESCVDAKSKAYCPYSHFRVGCAVLLANGDVVQGANVENAAYPVGTCAERVALGTAVGAKKGDFRALAVSTDISPPASPCGMCRQFIREFCELNTPILMYDKDGKSVVMTLEQLLPMSFGPDKLLPPGQLENGLMQTQTQSSFVTRAFSTTSSRRQDDTPQVPQSHYDFFPQTFPQGPPPKTSFSPDLKQLRKEFLQLQAKAHPDLAPQDQKRRAEALSMRINEAYKTLQSPLRRAQYLLSQQGIDVEDETAKLDDSSLLMEVMEAREAVEEVEDEEQLNEIRAENNGRIEESVRVLEDAFRDNEFEKAAQEAIRLRYWVNIEESIQGWEKGNGGGILHH

SEQ ID NO: 175 - protein, 165 aa, synthetic construct
  REGION 1..165: note = pYY-BEM4.66; tr|A0A2A9FXV0|A0A2A9FXV0_9VIBR polypeptide sequence
MCNLKENKDMDKYFHFACDATIEGMREGTGGPFGATLTRNGEVVCSVANTVLKDMDISGHAEMVAVREACKKLDTLDLSDCVMYATCEPCPMCVSVMLWAGIKTCYYASTHLDAAKHGFSDQQLRDYLDGSDTSTLNMVHIEDNRDDCAKIWTEFRHLNETKNDG

SEQ ID NO: 176 - protein, 509 aa, synthetic construct
  REGION 1..509: note = pYY-BEM4.67; tr|A0A1A8AG96|A0A1A8AG96_NOTFU polypeptide sequence
MEHSDRWSRAEPGLSTSSRETRDGSTQTDCKLQGHGPRLSKVNLFTLLSLWMELFPQEQDEENGQSQIRRSGLVVVREGKVVGLHCSGADLHAGQAAILQHGASLANCQLFFSRRPCATCLKMIINAGVRQITFWPGDPEISMLTSNQTHSQRTSQSITEASLDATAVEKLKSNSRPQICVLMQPLAPGVLQFVDETSRRSDFMERMMDDDPELDSEKLFNSDRLRHLKDFCRHFLIQTDQRHKDILSQMGLKNFCVEPYFSNLRSNMTELVEVLAAVAAGMPQQHYGFYREESLSLDPHPVDVSQAVARHCIVQARLLSYRTEDPKVGVGAVIWAKGQSACCCGTGRLYLIGCGYNAYPAGSKYAEYPQMDNKQEDRERRKYRYIVHAEQNALTFRTRDIKPDECSMLFVTKCPCDECIPLIRGAGVKHIYTSDQDRDKDKGDISYLRFGSLKGVCKFIWQRSPPVSSASSLHLTNGCVGKHVRQAEQQIYKNKKLCTKGSSGSSDIC

SEQ ID NO: 177 - protein, 148 aa, synthetic construct
  REGION 1..148: note = pYY-BEM4.68; tr|A0A3E2VN88|A0A3E2VN88_9FIRM polypeptide sequence
MEKEITNMDKQKLIQMAVDGLGRSYAPYSHFHVSAALLCADGTVYTGNNIENAAYTPSVCAERCAIFKAVGDGRREFEAIAVCGGPDGVIEDYCPPCGVCRQVMREFCDPSSFRVLVAKTAEDYREYTLEQLLPDGFGPDHLTGSGER

SEQ ID NO: 178 - protein, 221 aa, synthetic construct
  REGION 1..221: note = pYY-BEM4.69; tr|A0A2D5ZRJ2|A0A2D5ZRJ2_9BACT polypeptide sequence
MARPVHLHTGERRTEEGATESRAVAAVATAITRAPRAPPRPATGRERDGPPPRRVFGGGLRVGDPSGYDRGESKPIGGPLTEKRSDWHSYFMRIAGEVATRATCDRKHVGAVIVRNRTILSTGYNGSIRGMPHCDDVGHDMVDGHCIATIHAEANAILQAARNGVMIQDGSIYITASPCWNCFKLVANAGLKRVYYGEFYRDKRSFEVARRLGIDLMHIEV

SEQ ID NO: 179 - protein, 155 aa, synthetic construct
  REGION 1..155: note = pYY-BEM4.70; tr|A0A1B8WPS3|A0A1B8WPS3_9BACI polypeptide sequence
MEGVQLIYQFQWGNLIMTVNKEDLYLIDVARNTIKTLYVDGKHHVGAAVRTKTGKIYSAVHLEANIGRVSVCAEAIALGKAISEGESEFDTIVAVRHPDPTQENQKIEVVSPCGICRELISDYGKGTNVILKNKEGYIKTVISDLLPNKYIREDN

SEQ ID NO: 180 - protein, 156 aa, synthetic construct
  REGION 1..156: note = pYY-BEM4.71; tr|A0A1W5ZQK9|A0A1W5ZQK9_9BACI polypeptide sequence
MNRFMERAVSLAAENVRVGGQPFGAVLVKDDELVAEGVNEMHLNYDVSGHAELLAIRRAQGELQTHDLSGYTMYASGEPCPMCLSAMYFAGIKDVFYCATVEEAAQVGLEKSKNVYDDLQKSKGERSLVMKQMPLEDDQEDPMKLWDERTNHNGTS

SEQ ID NO: 181 - protein, 340 aa, synthetic construct
  REGION 1..340: note = pYY-BEM4.72; tr|A0A378V0W4|A0A378V0W4_MYCFO polypeptide sequence
MVHAQFDPTARQALAATAVEAKTRKDLTWQQIADAAELSPAFVTAAVLGQHALPARSAEAVAALLGLDDDAALLLQTIPIRGSIPGGIPTDPTIYRFYEMLQVYGTTLKALVHEQFGDGIISAINFKLDVRKVADPEGGERAVITLDGKYLPPNPFDRVRYRGGLMDFAQRTIDIARQNVAEGGRPFATVIVKNGEILAESPNLVAQTHDPTAHAEILAIRKACTRIGTEHLIGATIYVLAQPCPMCLGSLYYCSPDEVVFLTTRDAYEPHYVDDRKYFELNMFYDEFAKPWDQRRLPMRYEPRDAAVDVYKLWQERNGGERRVPGAPTSTRPGKNPRGE

SEQ ID NO: 182 - protein, 157 aa, synthetic construct
  REGION 1..157: note = pYY-BEM4.73; tr|I3XF03|I3XF03_RHIFR polypeptide sequence
MKQRCMSPKSAQRFWDNDMHNNKDRPMSENELFVAAREAMAKAHAPYSKFPVGAAIRAEDGQIYTGANIENLSFPEGWCAETTAISHMVMAGQRKIMEVAVIAEKLALCPPCGGCRQRLAEFSGASTRIYLCDETGIKKSLALSDLLPHSFETEILG

SEQ ID NO: 183 - protein, 595 aa, synthetic construct
  REGION 1..595: note = pYY-BEM4.74; tr|F8IEF3|F8IEF3_ALIAT polypeptide sequence
MDAKELETRGWLCMRAVDVIDKKRRGEALAEEELRFLIEGYVAGRIPDYQMSAFLMAVVWRGMTREETLVLTRLLADSGERLDLSGIPGVKVDKHSTGGVGDKATLVVLPLVASIGVPVIKMSGRGLGHTGGTIDKLESIPGFRTDLSVAELVAQVRQVGIALGGQTADLAPADKKLYALRDVTGTVESLPLIASSVMSKKLAGGADAIVLDVKVGDGAFMKSRSDARRLARLMVEIGEAAGRRTVAVLSNMDQPLGCAIGNALEVAEAIRVLSGEGPFDLAEIALALAEEMTVLAGVAATREEARRMLRQSVAEGRALETLRRWIAAQGGDPAVVDDPSRLPQAPVQMPYLPKKAGFVAKLSALAFGLAAMRLGAGRETKEEAIDPSVGIVLHAKVGDRVQTHRPMFTVHARTGEDALRCIQELEAAIQISDDPVEAPPLILARIDRSEALPYADLMDAAREARDRAYVPYSGFAVGAALELADGRMVTGANVENASYGLTNCAERSAVFRAVAEGGPGTKPEIRAVAVIADSPEPVSPCGACRQVLAEFCSPDTPVYLGNLQGDVRETTVGALLPGAFTDAQMANVRRQDKEA

SEQ ID NO: 184 - protein, 153 aa, synthetic construct
  REGION 1..153: note = pYY-BEM4.75; tr|A0A1G3M638|A0A1G3M638_9SPIR polypeptide sequence
MKTTNINALDKWDLRFLQMAEHVAEWSKDPSTKVGAVIVRPDRTIASVGFNGFARGVRDTVERLWNRELKYPLTVHAELNAILSAHEPVRGHSLYVSPLSPCSNCAGVIIQSGIARVVAKCGQVNNPAQWSESFNLALTAFAEAGVSVILVEH

SEQ ID NO: 185 - protein, 177 aa, synthetic construct
  REGION 1..177: note = pYY-BEM4.76; tr|A0A3D9LFR2|A0A3D9LFR2_9MICC polypeptide sequence
MEQNDHGSSGAFSDPFEDDIPLTASLPRITGTGSGIDWQRLESTARAAMTRAYVPYSRFPVGAAALVEDGRVVAGCNIENASLGLTLCAECSLVSNLQMSGGGRIVAFYCVDGNGEVLMPCGRCRQLLYEFHAPGMRLMGPDGELTMDEVLPLAFGPADMTHLSDSAASTDDPGRTR

SEQ ID NO: 186 - protein, 172 aa, synthetic construct
  REGION 1..172: note = pYY-BEM4.77; tr|A0A3B9YGB5|A0A3B9YGB5_9BACT polypeptide sequence
MAKPISKKYRKLIETAKAARKKAYSPYSRYQVGAAVLTESGRIYSGANMENASYGLCMCAERVAIANAVTRGEKVLQAVCVVGKKARPCGACRQVMLEFSTKETELLMVDIDPNARRDTVIRTRVYSMLPNPFDPFESGMLPQHPQNLLRRRKSPQPRRKRRSRPVHREVSR

SEQ ID NO: 187 - protein, 391 aa, synthetic construct
  REGION 1..391: note = pYY-BEM4.78; tr|A0A182F569|A0A182F569_ANOAL polypeptide sequence
MPRPSQFRVSSSQSLSNSQIQASQSSDSVVDITSYVNAVVKALLNLSCTKTIIKRADLVNIALKGNGRLIGRVLQDANIELKEIYGYELIEVEKSKTMILCSTLAAGSMDELNDANRRRYTFLYLILGYIFMKNGSVPETIVWEFLETLGIEEQQEHNYFGDVRKLYDSLFKQAYLTRTKQALEGLNDDVMLISWGVRSKHEVSKKDILAGFCKVMNRDPVDFKAQYIEANEKDDKMNNNINGTVDGRNTVEYSSLDASVKELIEAAIKVRNNAYCPYSNFAVGAALRTVGGDIVTGCNVENGTFGPSVCAERTAVCKAVSEGHREFTAVAVVAFQETEFTAPCGTCRQTLSEFSRKDIPIYLVKPSPVRVMVTSLFQLLPHAFSPSFLNK

SEQ ID NO: 188 - protein, 151 aa, synthetic construct
  REGION 1..151: note = pYY-BEM4.79; tr|A0A264Z0D4|A0A264Z0D4_9BACI polypeptide sequence
MEPKKLIEEAIVASKQAYVQYSNFHVGAALLTKDGKLYHGCNIENASYGLTNCAERTAIFKAVSEGEKEFQAIAVVGDTEGPISPCGACRQVLAEFFSPDTVVILANLKGDHVVTNINELLPGFFSSKDLQKKVKNCFEKNALGSSCLRPI

SEQ ID NO: 189 - protein, 229 aa, synthetic construct
  REGION 1..229: note = pYY-BEM4.80; tr|A0A1L9Q1R3|A0A1L9Q1R3_ASPVE polypeptide sequence
MPLSAEEAALVETATATINSIPLSEDYSVASAAKASDGRVFTGVNVYHFTGGPCAELVVLGVAAAAGAAQLTHIVAVANEQRGILSPCGRCRQVLLDLQPNIQVIVGKEGSEQSVPVAQLLPFSYRQPDQHTPVIFKALTSSGPVVVDFFATWCGPCKAVAPVVGKLSETYTDVRFIQVDVDKARSISQEHDIRAMPTFVLYKDGKLLDKRVVGGNMKELEEQIKAIIA

SEQ ID NO: 190 - protein, 18 aa, synthetic construct
  REGION 1..18: note = synthetic peptide
KRTADGSEFESPKKKRKV

SEQ ID NO: 191 - protein, 16 aa, synthetic construct
  REGION 1..16: note = synthetic peptide
KRPAATKKAGQAKKKK

SEQ ID NO: 192 - protein, 17 aa, synthetic construct
  REGION 1..17: note = synthetic peptide
KKTELQTTNAENKTKKL

SEQ ID NO: 193 - protein, 19 aa, synthetic construct
  REGION 1..19: note = synthetic peptide
KRGINDRNFWRGENGRKTR

SEQ ID NO: 194 - protein, 16 aa, synthetic construct
  REGION 1..16: note = synthetic peptide
RKSGKIAAIVVKRPRK

SEQ ID NO: 195 - protein, 7 aa, synthetic construct
  REGION 1..7: note = synthetic peptide
PKKKRKV

SEQ ID NO: 196 - protein, 30 aa, synthetic construct
  REGION 1..30: note = synthetic polypeptide
MDSLLMNRRKFLYQFKNVRWAKGRRETYLC

SEQ ID NO: 197 - protein, 1368 aa, Streptococcus pyogenes [sequence omitted]

SEQ ID NO: 198 - DNA, 4104 bp, Streptococcus pyogenes
  misc_feature 1..4104: note = wild type spCas9 polynucleotide sequence
  source 1..4104: mol_type = genomic DNA
atggataagaaatactcaataggcttagatatcggcacaaatagcgtcggatgggcggtgatcactgatgattataaggttccgtctaaaaagttcaaggttctgggaaatacagaccgccacagtatcaaaaaaaatcttataggggctcttttatttggcagtggagagacagcggaagcgactcgtctcaaacggacagctcgtagaaggtatacacgtcggaagaatcgtatttgttatctacaggagattttttcaaatgagatggcgaaagtagatgatagtttctttcatcgacttgaagagtcttttttggtggaagaagacaagaagcatgaacgtcatcctatttttggaaatatagtagatgaagttgcttatcatgagaaatatccaactatctatcatctgcgaaaaaaattggcagattctactgataaagcggatttgcgcttaatctatttggccttagcgcatatgattaagtttcgtggtcattttttgattgagggagatttaaatcctgataatagtgatgtggacaaactatttatccagttggtacaaatctacaatcaattatttgaagaaaaccctattaacgcaagtagagtagatgctaaagcgattctttctgcacgattgagtaaatcaagacgattagaaaatctcattgctcagctccccggtgagaagagaaatggcttgtttgggaatctcattgctttgtcattgggattgacccctaattttaaatcaaattttgatttggcagaagatgctaaattacagctttcaaaagatacttacgatgatgatttagataatttattggcgcaaattggagatcaatatgctgatttgtttttggcagctaagaatttatcagatgctattttactttcagatatcctaagagtaaatagtgaaataactaaggctcccctatcagcttcaatgattaagcgctacgatgaacatcatcaagacttgactcttttaaaagctttagttcgacaacaacttccagaaaagtataaagaaatcttttttgatcaatcaaaaaacggatatgcaggttatattgatgggggagctagccaagaagaattttataaatttatcaaaccaattttagaaaaaatggatggtactgaggaattattggtgaaactaaatcgtgaagatttgctgcgcaagcaacggacctttgacaacggctctattccccatcaaattcacttgggtgagctgcatgctattttgagaagacaagaagacttttatccatttttaaaagacaatcgtgagaagattgaaaaaatcttgacttttcgaattccttattatgttggtccattggcgcgtggcaatagtcgttttgcatggatgactcggaagtctgaagaaacaattaccccatggaattttgaagaagttgtcgataaaggtgcttcagctcaatcatttattgaacgcatgacaaactttgataaaaatcttccaaatgaaaaagtactaccaaaacatagtttgctttatgagtattttacggtttataacgaattgacaaaggtcaaatatgttactgagggaatgcgaaaaccagcatttctttcaggtgaacagaagaaagccattgttgatttactcttcaaaacaaatcgaaaagtaaccgttaagcaattaaaagaagattatttcaaaaaaatagaatgttttgatagtgttgaaatttcaggagttgaagatagatttaatgcttcattaggcgcctaccatgatttgctaaaaattattaaagataaagattttttggataatgaagaaaatgaagatatcttagaggatattgttttaacattgaccttatttgaagatagggggatgattgaggaaagacttaaaacatatgctcacctctttgatgataaggtgatgaaacagcttaaacgtcgccgttatactggttggggacgtttgtctcgaaaattgattaatggtattagggataagcaatctggcaaaacaatattagattttttgaaatcagatggttttgccaatcgcaattttatgcagctgatccatgatgatagtttgacatttaaagaagatattcaaaaagcacaggtgtctggacaaggccatagtttacatgaacagattgctaacttagctggcagtcctgctattaaaaaaggtattttacagactgtaaaaattgttgatgaactggtcaaagtaatggggcataagccagaaaatatcgttattgaaatggcacgtgaaaatcagacaactcaaaagggccagaaaaattcgcgagagcgtatgaaacgaatcgaagaaggtatcaaagaattaggaagtcagattcttaaagagcatcctgttgaaaatactcaattgcaaaatgaaaagctctatctctattatctacaaaatggaagagacatgtatgtggaccaagaattagatattaatcgtttaagtgattatgatgtcgatcacattgttccacaaagtttcattaaagacgattcaatagacaataaggtactaacgcgttctgataaaaatcgtggtaaatcggataacgttccaagtgaagaagtagtcaaaaagatgaaaaactattggagacaacttctaaacgccaagttaatcactcaacgtaagtttgataatttaacgaaagctgaacgtggaggtttgagtgaacttgataaagctggttttatcaaacgccaattggttgaaactcgccaaatcactaagcatgtggcacaaattttggatagtcgcatgaatactaaatacgatgaaaatgataaacttattcgagaggttaaagtgattaccttaaaatctaaattagtttctgacttccgaaaagatttccaattctataaagtacgtgagattaacaattaccatcatgcccatgatgcgtatctaaatgccgtcgttggaactgctttgattaagaaatatccaaaacttgaatcggagtttgtctatggtgattataaagtttatgatgttcgtaaaatgattgctaagtctgagcaagaaataggcaaagcaaccgcaaaatatttcttttactctaatatcatgaacttcttcaaaacagaaattacacttgcaaatggagagattcgcaaacgccctctaatcgaaactaatggggaaactggagaaattgtctgggataaagggcgagattttgccacagtgcgcaaagtattgtccatgccccaagtcaatattgtcaagaaaacagaagtacagacaggcggattctccaaggagtcaattttaccaaaaagaaattcggacaagcttattgctcgtaaaaaagactgggatccaaaaaaatatggtggttttgatagtccaacggtagcttattcagtcctagtggttgctaaggtggaaaaagggaaatcgaagaagttaaaatccgttaaagagttactagggatcacaattatggaaagaagttcctttgaaaaaaatccgattgactttttagaagctaaaggatataaggaagttaaaaaagacttaatcattaaactacctaaatatagtctttttgagttagaaaacggtcgtaaacggatgctggctagtgccggagaattacaaaaaggaaatgagctggctctgccaagcaaatatgtgaattttttatatttagctagtcattatgaaaagttgaagggtagtccagaagataacgaacaaaaacaattgtttgtggagcagcataagcattatttagatgagattattgagcaaatcagtgaattttctaagcgtgttattttagcagatgccaatttagataaagttcttagtgcatataacaaacatagagacaaaccaatacgtgaacaagcagaaaatattattcatttatttacgttgacgaatcttggagctcccgctgcttttaaatattttgatacaacaattgatcgtaaacgatatacgtctacaaaagaagttttagatgccactcttatccatcaatccatcactggtctttatgaaacacgcattgatttgagtcagctaggaggtgactga

SEQ ID NO: 199 - protein, 1367 aa, Streptococcus pyogenes
  REGION 1..1367: note = MISC_FEATURE - spCas9 polypeptide sequence
MDKKYSIGLDIGTNSVGWAVITDDYKVPSKKFKVLGNTDRHSIKKNLIGALLFGSGETAEATRLKRTARRRYTRRKNRICYLQEIFSNEMAKVDDSFFHRLEESFLVEEDKKHERHPIFGNIVDEVAYHEKYPTIYHLRKKLADSTDKADLRLIYLALAHMIKFRGHFLIEGDLNPDNSDVDKLFIQLVQIYNQLFEENPINASRVDAKAILSARLSKSRRLENLIAQLPGEKRNGLFGNLIALSLGLTPNFKSNFDLAEDAKLQLSKDTYDDDLDNLLAQIGDQYADLFLAAKNLSDAILLSDILRVNSEITKAPLSASMIKRYDEHHQDLTLLKALVRQQLPEKYKEIFFDQSKNGYAGYIDGGASQEEFYKFIKPILEKMDGTEELLVKLNREDLLRKQRTFDNGSIPHQIHLGELHAILRRQEDFYPFLKDNREKIEKILTFRIPYYVGPLARGNSRFAWMTRKSEETITPWNFEEVVDKGASAQSFIERMTNFDKNLPNEKVLPKHSLLYEYFTVYNELTKVKYVTEGMRKPAFLSGEQKKAIVDLLFKTNRKVTVKQLKEDYFKKIECFDSVEISGVEDRFNASLGAYHDLLKIIKDKDFLDNEENEDILEDIVLTLTLFEDRGMIEERLKTYAHLFDDKVMKQLKRRRYTGWGRLSRKLINGIRDKQSGKTILDFLKSDGFANRNFMQLIHDDSLTFKEDIQKAQVSGQGHSLHEQIANLAGSPAIKKGILQTVKIVDELVKVMGHKPENIVIEMARENQTTQKGQKNSRERMKRIEEGIKELGSQILKEHPVENTQLQNEKLYLYYLQNGRDMYVDQELDINRLSDYDVDHIVPQSFIKDDSIDNKVLTRSDKNRGKSDNVPSEEVVKKMKNYWRQLLNAKLITQRKFDNLTKAERGGLSELDKAGFIKRQLVETRQITKHVAQILDSRMNTKYDENDKLIREVKVITLKSKLVSDFRKDFQFYKVREINNYHHAHDAYLNAVVGTALIKKYPKLESEFVYGDYKVYDVRKMIAKSEQEIGKATAKYFFYSNIMNFFKTEITLANGEIRKRPLIETNGETGEIVWDKGRDFATVRKVLSMPQVNIVKKTEVQTGGFSKESILPKRNSDKLIARKKDWDPKKYGGFDSPTVAYSVLVVAKVEKGKSKKLKSVKELLGITIMERSSFEKNPIDFLEAKGYKEVKKDLIIKLPKYSLFELENGRKRMLASAGELQKGNELALPSKYVNFLYLASHYEKLKGSPEDNEQKQLFVEQHKHYLDEIIEQISEFSKRVILADANLDKVLSAYNKHRDKPIREQAENIIHLFTLTNLGAPAAFKYFDTTIDRKRYTSTKEVLDATLIHQSITGLYETRIDLSQLGGD

SEQ ID NO: 200 - DNA, 4212 bp, synthetic construct
  misc_feature 1..4212: note = wild-type Cas9 polynucleotide sequence
  misc_feature 5..58: note = RuvC domain
  misc_feature 718..764: note = RuvC domain
  misc_feature 772..901: note = HNH domain
  misc_feature 906..1101: note = RuvC domain
  source 1..4212: mol_type = other DNA
atggataaaaagtattctattggtttagacatcggcactaattccgttggatgggctgtcataaccgatgaatacaaagtaccttcaaagaaatttaaggtgttggggaacacagaccgtcattcgattaaaaagaatcttatcggtgccctcctattcgatagtggcgaaacggcagaggcgactcgcctgaaacgaaccgctcggagaaggtatacacgtcgcaagaaccgaatatgttacttacaagaaatttttagcaatgagatggccaaagttgacgattctttctttcaccgtttggaagagtccttccttgtcgaagaggacaagaaacatgaacggcaccccatctttggaaacatagtagatgaggtggcatatcatgaaaagtacccaacgatttatcacctcagaaaaaagctagttgactcaactgataaagcggacctgaggttaatctacttggctcttgcccatatgataaagttccgtgggcactttctcattgagggtgatctaaatccggacaactcggatgtcgacaaactgttcatccagttagtacaaacctataatcagttgtttgaagagaaccctataaatgcaagtggcgtggatgcgaaggctattcttagcgcccgcctctctaaatcccgacggctagaaaacctgatcgcacaattacccggagagaagaaaaatgggttgttcggtaaccttatagcgctctcactaggcctgacaccaaattttaagtcgaacttcgacttagctgaagatgccaaattgcagcttagtaaggacacgtacgatgacgatctcgacaatctactggcacaaattggagatcagtatgcggacttatttttggctgccaaaaaccttagcgatgcaatcctcctatctgacatactgagagttaatactgagattaccaaggcgccgttatccgcttcaatgatcaaaaggtacgatgaacatcaccaagacttgacacttctcaaggccctagtccgtcagcaactgcctgagaaatataaggaaatattctttgatcagtcgaaaaacgggtacgcaggttatattgacggcggagcgagtcaagaggaattctacaagtttatcaaacccatattagagaagatggatgggacggaagagttgcttgtaaaactcaatcgcgaagatctactgcgaaagcagcggactttcgacaacggtagcattccacatcaaatccacttaggcgaattgcatgctatacttagaaggcaggaggatttttatccgttcctcaaagacaatcgtgaaaagattgagaaaatcctaacctttcgcataccttactatgtgggacccctggcccgagggaactctcggttcgcatggatgacaagaaagtccgaagaaacgattactccatggaattttgaggaagttgtcgataaaggtgcgtcagctcaatcgttcatcgagaggatgaccaactttgacaagaatttaccgaacgaaaaagtattgcctaagcacagtttactttacgagtatttcacagtgtacaatgaactcacgaaagttaagtatgtcactgagggcatgcgtaaacccgcctttctaagcggagaacagaagaaagcaatagtagatctgttattcaagaccaaccgcaaagtgacagttaagcaattgaaagaggactactttaagaaaattgaatgcttcgattctgtcgagatctccggggtagaagatcgatttaatgcgtcacttggtacgtatcatgacctcctaaagataattaaagataaggacttcctggataacgaagagaatgaagatatcttagaagatatagtgttgactcttaccctctttgaagatcgggaaatgattgaggaaagactaaaaacatacgctcacctgttcgacgataaggttatgaaacagttaaagaggcgtcgctatacgggctggggacgattgtcgcggaaacttatcaacgggataagagacaagcaaagtggtaaaactattctcgattttctaaagagcgacggcttcgccaataggaactttatgcagctgatccatgatgactctttaaccttcaaagaggatatacaaaaggcacaggtttccggacaaggggactcattgcacgaacatattgcgaatcttgctggttcgccagccatcaaaaagggcatactccagacagtcaaagtagtggatgagctagttaaggtcatgggacgtcacaaaccggaaaacattgtaatcgagatggcacgcgaaaatcaaacgactcagaaggggcaaaaaaacagtcgagagcggatgaagagaatagaagagggtattaaagaactgggcagccagatcttaaaggagcatcctgtggaaaatacccaattgcagaacgagaaactttacctctattacctacaaaatggaagggacatgtatgttgatcaggaactggacataaaccgtttatctgattacgacgtcgatcacattgtaccccaatcctttttgaaggacgattcaatcgacaataaagtgcttacacgctcggataagaaccgagggaaaagtgacaatgttccaagcgaggaagtcgtaaagaaaatgaagaactattggcggcagctcctaaatgcgaaactgataacgcaaagaaagttcgataacttaactaaagctgagaggggtggcttgtctgaacttgacaaggccggatttattaaacgtcagctcgtggaaacccgccaaatcacaaagcatgttgcacagatactagattcccgaatgaatacgaaatacgacgagaacgataagctgattcgggaagtcaaagtaatcactttaaagtcaaaattggtgtcggacttcagaaaggattttcaattctataaagttagggagataaataactaccaccatgcgcacgacgcttatcttaatgccgtcgtagggaccgcactcattaagaaatacccgaagctagaaagtgagtttgtgtatggtgattacaaagtttatgacgtccgtaagatgatcgcgaaaagcgaacaggagataggcaaggctacagccaaatacttcttttattctaacattatgaatttctttaagacggaaatcactctggcaaacggagagatacgcaaacgacctttaattgaaaccaatggggagacaggtgaaatcgtatgggataagggccgggacttcgcgacggtgagaaaagttttgtccatgccccaagtcaacatagtaaagaaaactgaggtgcagaccggagggttttcaaaggaatcgattcttccaaaaaggaatagtgataagctcatcgctcgtaaaaaggactgggacccgaaaaagtacggtggcttcgatagccctacagttgcctattctgtcctagtagtggcaaaagttgagaagggaaaatccaagaaactgaagtcagtcaaagaattattggggataacgattatggagcgctcgtcttttgaaaagaaccccatcgacttccttgaggcgaaaggttacaaggaagtaaaaaaggatctcataattaaactaccaaagtatagtctgtttgagttagaaaatggccgaaaacggatgttggctagcgccggagagcttcaaaaggggaacgaactcgcactaccgtctaaatacgtgaatttcctgtatttagcgtcccattacgagaagttgaaaggttcacctgaagataacgaacagaagcaactttttgttgagcagcacaaacattatctcgacgaaatcatagagcaaatttcggaattcagtaagagagtcatcctagctgatgccaatctggacaaagtattaagcgcatacaacaagcacagggataaacccatacgtgagcaggcggaaaatattatccatttgtttactcttaccaacctcggcgctccagccgcattcaagtattttgacacaacgatagatcgcaaacgatacacttctaccaaggaggtgctagacgcgacactgattcaccaatccatcacgggattatatgaaactcggatagatttgtcacagcttgggggtgacggatcccccaagaagaagaggaaagtctcgagcgactacaaagaccatgacggtgattataaagatcatgacatcgattacaaggatgacgatgacaaggctgcagga

SEQ ID NO: 201 - protein, 1368 aa, synthetic construct
  REGION 1..1368: note = exemplary catalytically active Cas9 nickase (nCas9) polypeptide sequence
MDKKYSIGLAIGTNSVGWAVITDEYKVPSKKFKVLGNTDRHSIKKNLIGALLFDSGETAEATRLKRTARRRYTRRKNRICYLQEIFSNEMAKVDDSFFHRLEESFLVEEDKKHERHPIFGNIVDEVAYHEKYPTIYHLRKKLVDSTDKADLRLIYLALAHMIKFRGHFLIEGDLNPDNSDVDKLFIQLVQTYNQLFEENPINASGVDAKAILSARLSKSRRLENLIAQLPGEKKNGLFGNLIALSLGLTPNFKSNFDLAEDAKLQLSKDTYDDDLDNLLAQIGDQYADLFLAAKNLSDAILLSDILRVNTEITKAPLSASMIKRYDEHHQDLTLLKALVRQQLPEKYKEIFFDQSKNGYAGYIDGGASQEEFYKFIKPILEKMDGTEELLVKLNREDLLRKQRTFDNGSIPHQIHLGELHAILRRQEDFYPFLKDNREKIEKILTFRIPYYVGPLARGNSRFAWMTRKSEETITPWNFEEVVDKGASAQSFIERMTNFDKNLPNEKVLPKHSLLYEYFTVYNELTKVKYVTEGMRKPAFLSGEQKKAIVDLLFKTNRKVTVKQLKEDYFKKIECFDSVEISGVEDRFNASLGTYHDLLKIIKDKDFLDNEENEDILEDIVLTLTLFEDREMIEERLKTYAHLFDDKVMKQLKRRRYTGWGRLSRKLINGIRDKQSGKTILDFLKSDGFANRNFMQLIHDDSLTFKEDIQKAQVSGQGDSLHEHIANLAGSPAIKKGILQTVKVVDELVKVMGRHKPENIVIEMARENQTTQKGQKNSRERMKRIEEGIKELGSQILKEHPVENTQLQNEKLYLYYLQNGRDMYVDQELDINRLSDYDVDHIVPQSFLKDDSIDNKVLTRSDKNRGKSDNVPSEEVVKKMKNYWRQLLNAKLITQRKFDNLTKAERGGLSELDKAGFIKRQLVETRQITKHVAQILDSRMNTKYDENDKLIREVKVITLKSKLVSDFRKDFQFYKVREINNYHHAHDAYLNAVVGTALIKKYPKLESEFVYGDYKVYDVRKMIAKSEQEIGKATAKYFFYSNIMNFFKTEITLANGEIRKRPLIETNGETGEIVWDKGRDFATVRKVLSMPQVNIVKKTEVQTGGFSKESILPKRNSDKLIARKKDWDPKKYGGFDSPTVAYSVLVVAKVEKGKSKKLKSVKELLGITIMERSSFEKNPIDFLEAKGYKEVKKDLIIKLPKYSLFELENGRKRMLASAGELQKGNELALPSKYVNFLYLASHYEKLKGSPEDNEQKQLFVEQHKHYLDEIIEQISEFSKRVILADANLDKVLSAYNKHRDKPIREQAENIIHLFTLTNLGAPAAFKYFDTTIDRKRYTSTKEVLDATLIHQSITGLYETRIDLSQLGGD

SEQ ID NO: 202 - DNA, 4107 bp, Streptococcus pyogenes
  misc_feature 1..4107: note = Cas9 from Streptococcus pyogenes (NCBI Ref. Seq.: NC_002737.2)polynucleotide sequence
  source 1..4107: mol_type = genomic DNA
atggataagaaatactcaataggcttagatatcggcacaaatagcgtcggatgggcggtgatcactgatgaatataaggttccgtctaaaaagttcaaggttctgggaaatacagaccgccacagtatcaaaaaaaatcttataggggctcttttatttgacagtggagagacagcggaagcgactcgtctcaaacggacagctcgtagaaggtatacacgtcggaagaatcgtatttgttatctacaggagattttttcaaatgagatggcgaaagtagatgatagtttctttcatcgacttgaagagtcttttttggtggaagaagacaagaagcatgaacgtcatcctatttttggaaatatagtagatgaagttgcttatcatgagaaatatccaactatctatcatctgcgaaaaaaattggtagattctactgataaagcggatttgcgcttaatctatttggccttagcgcatatgattaagtttcgtggtcattttttgattgagggagatttaaatcctgataatagtgatgtggacaaactatttatccagttggtacaaacctacaatcaattatttgaagaaaaccctattaacgcaagtggagtagatgctaaagcgattctttctgcacgattgagtaaatcaagacgattagaaaatctcattgctcagctccccggtgagaagaaaaatggcttatttgggaatctcattgctttgtcattgggtttgacccctaattttaaatcaaattttgatttggcagaagatgctaaattacagctttcaaaagatacttacgatgatgatttagataatttattggcgcaaattggagatcaatatgctgatttgtttttggcagctaagaatttatcagatgctattttactttcagatatcctaagagtaaatactgaaataactaaggctcccctatcagcttcaatgattaaacgctacgatgaacatcatcaagacttgactcttttaaaagctttagttcgacaacaacttccagaaaagtataaagaaatcttttttgatcaatcaaaaaacggatatgcaggttatattgatgggggagctagccaagaagaattttataaatttatcaaaccaattttagaaaaaatggatggtactgaggaattattggtgaaactaaatcgtgaagatttgctgcgcaagcaacggacctttgacaacggctctattccccatcaaattcacttgggtgagctgcatgctattttgagaagacaagaagacttttatccatttttaaaagacaatcgtgagaagattgaaaaaatcttgacttttcgaattccttattatgttggtccattggcgcgtggcaatagtcgttttgcatggatgactcggaagtctgaagaaacaattaccccatggaattttgaagaagttgtcgataaaggtgcttcagctcaatcatttattgaacgcatgacaaactttgataaaaatcttccaaatgaaaaagtactaccaaaacatagtttgctttatgagtattttacggtttataacgaattgacaaaggtcaaatatgttactgaaggaatgcgaaaaccagcatttctttcaggtgaacagaagaaagccattgttgatttactcttcaaaacaaatcgaaaagtaaccgttaagcaattaaaagaagattatttcaaaaaaatagaatgttttgatagtgttgaaatttcaggagttgaagatagatttaatgcttcattaggtacctaccatgatttgctaaaaattattaaagataaagattttttggataatgaagaaaatgaagatatcttagaggatattgttttaacattgaccttatttgaagatagggagatgattgaggaaagacttaaaacatatgctcacctctttgatgataaggtgatgaaacagcttaaacgtcgccgttatactggttggggacgtttgtctcgaaaattgattaatggtattagggataagcaatctggcaaaacaatattagattttttgaaatcagatggttttgccaatcgcaattttatgcagctgatccatgatgatagtttgacatttaaagaagacattcaaaaagcacaagtgtctggacaaggcgatagtttacatgaacatattgcaaatttagctggtagccctgctattaaaaaaggtattttacagactgtaaaagttgttgatgaattggtcaaagtaatggggcggcataagccagaaaatatcgttattgaaatggcacgtgaaaatcagacaactcaaaagggccagaaaaattcgcgagagcgtatgaaacgaatcgaagaaggtatcaaagaattaggaagtcagattcttaaagagcatcctgttgaaaatactcaattgcaaaatgaaaagctctatctctattatctccaaaatggaagagacatgtatgtggaccaagaattagatattaatcgtttaagtgattatgatgtcgatcacattgttccacaaagtttccttaaagacgattcaatagacaataaggtcttaacgcgttctgataaaaatcgtggtaaatcggataacgttccaagtgaagaagtagtcaaaaagatgaaaaactattggagacaacttctaaacgccaagttaatcactcaacgtaagtttgataatttaacgaaagctgaacgtggaggtttgagtgaacttgataaagctggttttatcaaacgccaattggttgaaactcgccaaatcactaagcatgtggcacaaattttggatagtcgcatgaatactaaatacgatgaaaatgataaacttattcgagaggttaaagtgattaccttaaaatctaaattagtttctgacttccgaaaagatttccaattctataaagtacgtgagattaacaattaccatcatgcccatgatgcgtatctaaatgccgtcgttggaactgctttgattaagaaatatccaaaacttgaatcggagtttgtctatggtgattataaagtttatgatgttcgtaaaatgattgctaagtctgagcaagaaataggcaaagcaaccgcaaaatatttcttttactctaatatcatgaacttcttcaaaacagaaattacacttgcaaatggagagattcgcaaacgccctctaatcgaaactaatggggaaactggagaaattgtctgggataaagggcgagattttgccacagtgcgcaaagtattgtccatgccccaagtcaatattgtcaagaaaacagaagtacagacaggcggattctccaaggagtcaattttaccaaaaagaaattcggacaagcttattgctcgtaaaaaagactgggatccaaaaaaatatggtggttttgatagtccaacggtagcttattcagtcctagtggttgctaaggtggaaaaagggaaatcgaagaagttaaaatccgttaaagagttactagggatcacaattatggaaagaagttcctttgaaaaaaatccgattgactttttagaagctaaaggatataaggaagttaaaaaagacttaatcattaaactacctaaatatagtctttttgagttagaaaacggtcgtaaacggatgctggctagtgccggagaattacaaaaaggaaatgagctggctctgccaagcaaatatgtgaattttttatatttagctagtcattatgaaaagttgaagggtagtccagaagataacgaacaaaaacaattgtttgtggagcagcataagcattatttagatgagattattgagcaaatcagtgaattttctaagcgtgttattttagcagatgccaatttagataaagttcttagtgcatataacaaacatagagacaaaccaatacgtgaacaagcagaaaatattattcatttatttacgttgacgaatcttggagctcccgctgcttttaaatattttgatacaacaattgatcgtaaacgatatacgtctacaaaagaagttttagatgccactcttatccatcaatccatcactggtctttatgaaacacgcattgatttgagtcagctaggaggtgactga

SEQ ID NO: 203 - protein, 1368 aa, synthetic construct
  REGION 1..1368: note = catalytically inactive Cas9 (dCas9)polypeptide sequence
  REGION 5..58: note = MISC_FEATURE - RuvC domain
  REGION 718..764: note = MISC_FEATURE - RuvC domain
  REGION 773..902: note = MISC_FEATURE - HNH domain
  REGION 907..1102: note = MISC_FEATURE - RuvC domain
MDKKYSIGLAIGTNSVGWAVITDEYKVPSKKFKVLGNTDRHSIKKNLIGALLFDSGETAEATRLKRTARRRYTRRKNRICYLQEIFSNEMAKVDDSFFHRLEESFLVEEDKKHERHPIFGNIVDEVAYHEKYPTIYHLRKKLVDSTDKADLRLIYLALAHMIKFRGHFLIEGDLNPDNSDVDKLFIQLVQTYNQLFEENPINASGVDAKAILSARLSKSRRLENLIAQLPGEKKNGLFGNLIALSLGLTPNFKSNFDLAEDAKLQLSKDTYDDDLDNLLAQIGDQYADLFLAAKNLSDAILLSDILRVNTEITKAPLSASMIKRYDEHHQDLTLLKALVRQQLPEKYKEIFFDQSKNGYAGYIDGGASQEEFYKFIKPILEKMDGTEELLVKLNREDLLRKQRTFDNGSIPHQIHLGELHAILRRQEDFYPFLKDNREKIEKILTFRIPYYVGPLARGNSRFAWMTRKSEETITPWNFEEVVDKGASAQSFIERMTNFDKNLPNEKVLPKHSLLYEYFTVYNELTKVKYVTEGMRKPAFLSGEQKKAIVDLLFKTNRKVTVKQLKEDYFKKIECFDSVEISGVEDRFNASLGTYHDLLKIIKDKDFLDNEENEDILEDIVLTLTLFEDREMIEERLKTYAHLFDDKVMKQLKRRRYTGWGRLSRKLINGIRDKQSGKTILDFLKSDGFANRNFMQLIHDDSLTFKEDIQKAQVSGQGDSLHEHIANLAGSPAIKKGILQTVKVVDELVKVMGRHKPENIVIEMARENQTTQKGQKNSRERMKRIEEGIKELGSQILKEHPVENTQLQNEKLYLYYLQNGRDMYVDQELDINRLSDYDVDAIVPQSFLKDDSIDNKVLTRSDKNRGKSDNVPSEEVVKKMKNYWRQLLNAKLITQRKFDNLTKAERGGLSELDKAGFIKRQLVETRQITKHVAQILDSRMNTKYDENDKLIREVKVITLKSKLVSDFRKDFQFYKVREINNYHHAHDAYLNAVVGTALIKKYPKLESEFVYGDYKVYDVRKMIAKSEQEIGKATAKYFFYSNIMNFFKTEITLANGEIRKRPLIETNGETGEIVWDKGRDFATVRKVLSMPQVNIVKKTEVQTGGFSKESILPKRNSDKLIARKKDWDPKKYGGFDSPTVAYSVLVVAKVEKGKSKKLKSVKELLGITIMERSSFEKNPIDFLEAKGYKEVKKDLIIKLPKYSLFELENGRKRMLASAGELQKGNELALPSKYVNFLYLASHYEKLKGSPEDNEQKQLFVEQHKHYLDEIIEQISEFSKRVILADANLDKVLSAYNKHRDKPIREQAENIIHLFTLTNLGAPAAFKYFDTTIDRKRYTSTKEVLDATLIHQSITGLYETRIDLSQLGGD

SEQ ID NO: 204 - protein, 345 aa, Sulfolobus islandicus
  REGION 1..345: note = MISC_FEATURE - tr|F0NN87|F0NN87_SULIHCRISPR-associatedCasx protein OS =Sulfolobus islandicus (strain HVE10/4) GN = SiH_0402 PE=4; SV = 1);CasX polypeptide sequence
MEVPLYNIFGDNYIIQVATEAENSTIYNNKVEIDDEELRNVLNLAYKIAKNNEDAAAERRGKAKKKKGEEGETTTSNIILPLSGNDKNPWTETLKCYNFPTTVALSEVFKNFSQVKECEEVSAPSFVKPEFYEFGRSPGMVERTRRVKLEVEPHYLIIAAAGWVLTRLGKAKVSEGDYVGVNVFTPTRGILYSLIQNVNGIVPGIKPETAFGLWIARKVVSSVTNPNVSVVRIYTISDAVGQNPTTINGGFSIDLTKLLEKRYLLSERLEAIARNALSISSNMRERYIVLANYIYEYLTGSKRLEDLLYFANRDLIMNLNSDDGKVRDLKLISAYVNGELIRGEG

SEQ ID NO: 205 - protein, 345 aa, Sulfolobus islandicus
  REGION 1..345: note = MISC_FEATURE - tr|F0NH53|F0NH53_SULIR CRISPR associated protein, Casx OS =Sulfolobus islandicus (strain REY15A) GN=SiRe_0771 PE=4 SV=1);CasX polypeptide sequence
MEVPLYNIFGDNYIIQVATEAENSTIYNNKVEIDDEELRNVLNLAYKIAKNNEDAAAERRGKAKKKKGEEGETTTSNIILPLSGNDKNPWTETLKCYNFPTTVALSEVFKNFSQVKECEEVSAPSFVKPEFYKFGRSPGMVERTRRVKLEVEPHYLIMAAAGWVLTRLGKAKVSEGDYVGVNVFTPTRGILYSLIQNVNGIVPGIKPETAFGLWIARKVVSSVTNPNVSVVSIYTISDAVGQNPTTINGGFSIDLTKLLEKRDLLSERLEAIARNALSISSNMRERYIVLANYIYEYLTGSKRLEDLLYFANRDLIMNLNSDDGKVRDLKLISAYVNGELIRGEG

SEQ ID NO: 206 - protein, 987 aa, unidentified
  REGION 1..987: note = MISC_FEATURE - CasX polypeptide sequence
MEKRINKIRKKLSADNATKPVSRSGPMKTLLVRVMTDDLKKRLEKRRKKPEVMPQVISNNAANNLRMLLDDYTKMKEAILQVYWQEFKDDHVGLMCKFAQPASKKIDQNKLKPEMDEKGNLTTAGFACSQCGQPLFVYKLEQVSEKGKAYTNYFGRCNVAEHEKLILLAQLKPVKDSDEAVTYSLGKFGQRALDFYSIHVTKESTHPVKPLAQIAGNRYASGPVGKALSDACMGTIASFLSKYQDIIIEHQKVVKGNQKRLESLRELAGKENLEYPSVTLPPQPHTKEGVDFAYNEVIARVRMWVNLNLWQKLKLSRDDAKPLLRLKGFPSFPVVERRENEVDWWNTINEVKKLIDAKRDMGRVFWSGVTAEKRNTILEGYNYLPNENDHKKREGSLENPKKPAKRQFGDLLLYLEKKYAGDWGKVFDEAWERIDKKIAGLTSHIEREEARNAEDAQSKAVLTDWLRAKASFVLERLKEMDEKEFYACEIQLQKWYGDLRGNPFAVEAENRVVDISGFSIGSDGHSIQYRNLLAWKYLENGKREFYLLMNYGKKGRIRFTDGTDIKKSGKWQGLLYGGGKAKVIDLTFDPDDEQLIILPLAFGTRQGREFIWNDLLSLETGLIKLANGRVIEKTIYNKKIGRDEPALFVALTFERREVVDPSNIKPVNLIGVARGENIPAVIALTDPEGCPLPEFKDSSGGPTDILRIGEGYKEKQRAIQAAKEVEQRRAGGYSRKFASKSRNLADDMVRNSARDLFYHAVTHDAVLVFANLSRGFGRQGKRTFMTERQYTKMEDWLTAKLAYEGLTSKTYLSKTLAQYTSKTCSNCGFTITYADMDVMLVRLKKTSDGWATTLNNKELKAEYQITYYNRYKRQTVEKELSAELDRLSEESGNNDISKWTKGRRDEALFLLKKRFSHRPVQEQFVCLDCGHEVHAAEQAALNIARSWLFLNSNSTEFKSYKSGKQPFVGAWQAFYKRRLKEVWKPNA

SEQ ID NO: 207 - protein, 1210 aa, unidentified
  REGION 1..1210: note = MISC_FEATURE - APG80656.1 CRISPR-associated protein CasY [uncultured Parcubacteria group bacterium]; CasY polypeptide sequence
MSKRHPRISGVKGYRLHAQRLEYTGKSGAMRTIKYPLYSSPSGGRTVPREIVSAINDDYVGLYGLSNFDDLYNAEKRNEEKVYSVLDFWYDCVQYGAVFSYTAPGLLKNVAEVRGGSYELTKTLKGSHLYDELQIDKVIKFLNKKEISRANGSLDKLKKDIIDCFKAEYRERHKDQCNKLADDIKNAKKDAGASLGERQKKLFRDFFGISEQSENDKPSFTNPLNLTCCLLPFDTVNNNRNRGEVLFNKLKEYAQKLDKNEGSLEMWEYIGIGNSGTAFSNFLGEGFLGRLRENKITELKKAMMDITDAWRGQEQEEELEKRLRILAALTIKLREPKFDNHWGGYRSDINGKLSSWLQNYINQTVKIKEDLKGHKKDLKKAKEMINRFGESDTKEEAVVSSLLESIEKIVPDDSADDEKPDIPAIAIYRRFLSDGRLTLNRFVQREDVQEALIKERLEAEKKKKPKKRKKKSDAEDEKETIDFKELFPHLAKPLKLVPNFYGDSKRELYKKYKNAAIYTDALWKAVEKIYKSAFSSSLKNSFFDTDFDKDFFIKRLQKIFSVYRRFNTDKWKPIVKNSFAPYCDIVSLAENEVLYKPKQSRSRKSAAIDKNRVRLPSTENIAKAGIALARELSVAGFDWKDLLKKEEHEEYIDLIELHKTALALLLAVTETQLDISALDFVENGTVKDFMKTRDGNLVLEGRFLEMFSQSIVFSELRGLAGLMSRKEFITRSAIQTMNGKQAELLYIPHEFQSAKITTPKEMSRAFLDLAPAEFATSLEPESLSEKSLLKLKQMRYYPHYFGYELTRTGQGIDGGVAENALRLEKSPVKKREIKCKQYKTLGRGQNKIVLYVRSSYYQTQFLEWFLHRPKNVQTDVAVSGSFLIDEKKVKTRWNYDALTVALEPVSGSERVFVSQPFTIFPEKSAEEEGQRYLGIDIGEYGIAYTALEITGDSAKILDQNFISDPQLKTLREEVKGLKLDQRRGTFAMPSTKIARIRESLVHSLRNRIHHLALKHKAKIVYELEVSRFEEGKQKIKKVYATLKKADVYSEIDADKNLQTTVWGKLAVASEISASYTSQFCGACKKLWRAEMQVDETITTQELIGTVRVIKGGTLIDAIKDFMRPPIFDENDTPFPKYRDFCDKHHISKKMRGNSCLFICPFCRANADADIQASQTIALLRYVKEEKKVEDYFERFRKLKNIKVLGQMKKI

SEQ ID NO: 208 - protein, 1082 aa, Neisseria meningitidis
  REGION 1..1082: note = MISC_FEATURE - NCBI Reference: WP_002235162.1; type II CRISPR RNA-guided endonuclease Cas9; Nme1Cas9 polypeptide sequence
MAAFKPNPINYILGLDIGIASVGWAMVEIDEDENPICLIDLGVRVFERAEVPKTGDSLAMARRLARSVRRLTRRRAHRLLRARRLLKREGVLQAADFDENGLIKSLPNTPWQLRAAALDRKLTPLEWSAVLLHLIKHRGYLSQRKNEGETADKELGALLKGVADNAHALQTGDFRTPAELALNKFEKESGHIRNQRGDYSHTFSRKDLQAELILLFEKQKEFGNPHVSGGLKEGIETLLMTQRPALSGDAVQKMLGHCTFEPAEPKAAKNTYTAERFIWLTKLNNLRILEQGSERPLTDTERATLMDEPYRKSKLTYAQARKLLGLEDTAFFKGLRYGKDNAEASTLMEMKAYHAISRALEKEGLKDKKSPLNLSPELQDEIGTAFSLFKTDEDITGRLKDRIQPEILEALLKHISFDKFVQISLKALRRIVPLMEQGKRYDEACAEIYGDHYGKKNTEEKIYLPPIPADEIRNPVVLRALSQARKVINGVVRRYGSPARIHIETAREVGKSFKDRKEIEKRQEENRKDREKAAAKFREYFPNFVGEPKSKDILKLRLYEQQHGKCLYSGKEINLGRLNEKGYVEIDHALPFSRTWDDSFNNKVLVLGSENQNKGNQTPYEYFNGKDNSREWQEFKARVETSRFPRSKKQRILLQKFDEDGFKERNLNDTRYVNRFLCQFVADRMRLTGKGKKRVFASNGQITNLLRGFWGLRKVRAENDRHHALDAVVVACSTVAMQQKITRFVRYKEMNAFDGKTIDKETGEVLHQKTHFPQPWEFFAQEVMIRVFGKPDGKPEFEEADTPEKLRTLLAEKLSSRPEAVHEYVTPLFVSRAPNRKMSGQGHMETVKSAKRLDEGVSVLRVPLTQLKLKDLEKMVNREREPKLYEALKARLEAHKDDPAKAFAEPFYKYDKAGNRTQQVKAVRVEQVQKTGVWVRNHNGIADNATMVRVDVFEKGDKYYLVPIYSWQVAKGILPDRAVVQGKDEEDWQLIDDSFNFKFSLHPNDLVEVITKKARMFGYFASCHRGTGNINIRIHDLDHKIGKNGILEGIGVKTALSFQKYQIDELGKEIRPCRLKKRPPVR

SEQ ID NO: 209 - protein, 1082 aa, Neisseria meningitidis
  REGION 1..1082: note = MISC_FEATURE - NCBI Reference: WP_002230835; type II CRISPR RNA-guided endonuclease Cas9; Nme2Cas9 polypeptide sequence
MAAFKPNPINYILGLDIGIASVGWAMVEIDEEENPIRLIDLGVRVFERAEVPKTGDSLAMARRLARSVRRLTRRRAHRLLRARRLLKREGVLQAADFDENGLIKSLPNTPWQLRAAALDRKLTPLEWSAVLLHLIKHRGYLSQRKNEGETADKELGALLKGVANNAHALQTGDFRTPAELALNKFEKESGHIRNQRGDYSHTFSRKDLQAELILLFEKQKEFGNPHVSGGLKEGIETLLMTQRPALSGDAVQKMLGHCTFEPAEPKAAKNTYTAERFIWLTKLNNLRILEQGSERPLTDTERATLMDEPYRKSKLTYAQARKLLGLEDTAFFKGLRYGKDNAEASTLMEMKAYHAISRALEKEGLKDKKSPLNLSSELQDEIGTAFSLFKTDEDITGRLKDRVQPEILEALLKHISFDKFVQISLKALRRIVPLMEQGKRYDEACAEIYGDHYGKKNTEEKIYLPPIPADEIRNPVVLRALSQARKVINGVVRRYGSPARIHIETAREVGKSFKDRKEIEKRQEENRKDREKAAAKFREYFPNFVGEPKSKDILKLRLYEQQHGKCLYSGKEINLVRLNEKGYVEIDHALPFSRTWDDSFNNKVLVLGSENQNKGNQTPYEYFNGKDNSREWQEFKARVETSRFPRSKKQRILLQKFDEDGFKECNLNDTRYVNRFLCQFVADHILLTGKGKRRVFASNGQITNLLRGFWGLRKVRAENDRHHALDAVVVACSTVAMQQKITRFVRYKEMNAFDGKTIDKETGKVLHQKTHFPQPWEFFAQEVMIRVFGKPDGKPEFEEADTPEKLRTLLAEKLSSRPEAVHEYVTPLFVSRAPNRKMSGAHKDTLRSAKRFVKHNEKISVKRVWLTEIKLADLENMVNYKNGREIELYEALKARLEAYGGNAKQAFDPKDNPFYKKGGQLVKAVRVEKTQESGVLLNKKNAYTIADNGDMVRVDVFCKVDKKGKNQYFIVPIYAWQVAENILPDIDCKGYRIDDSYTFCFSLHKYDLIAFQKDEKSKVEFAYYINCDSSNGRFYLAWHDKGSKEQQFRISTQNLVLIQKYQVNELGKEIRPCRLKKRPPVR

SEQ ID NO: 210 - protein, 1300 aa, Francisella tularensis
  REGION 1..1300: note = MISC_FEATURE - wild type Cpf1 polypeptide sequence
  source 1..1300: note = subspecies novicida
MSIYQEFVNKYSLSKTLRFELIPQGKTLENIKARGLILDDEKRAKDYKKAKQIIDKYHQFFIEEILSSVCISEDLLQNYSDVYFKLKKSDDDNLQKDFKSAKDTIKKQISEYIKDSEKFKNLFNQNLIDAKKGQESDLILWLKQSKDNGIELFKANSDITDIDEALEIIKSFKGWTTYFKGFHENRKNVYSSNDIPTSIIYRIVDDNLPKFLENKAKYESLKDKAPEAINYEQIKKDLAEELTFDIDYKTSEVNQRVFSLDEVFEIANFNNYLNQSGITKFNTIIGGKFVNGENTKRKGINEYINLYSQQINDKTLKKYKMSVLFKQILSDTESKSFVIDKLEDDSDVVTTMQSFYEQIAAFKTVEEKSIKETLSLLFDDLKAQKLDLSKIYFKNDKSLTDLSQQVFDDYSVIGTAVLEYITQQIAPKNLDNPSKKEQELIAKKTEKAKYLSLETIKLALEEFNKHRDIDKQCRFEEILANFAAIPMIFDEIAQNKDNLAQISIKYQNQGKKDLLQASAEDDVKAIKDLLDQTNNLLHKLKIFHISQSEDKANILDKDEHFYLVFEECYFELANIVPLYNKIRNYITQKPYSDEKFKLNFENSTLANGWDKNKEPDNTAILFIKDDKYYLGVMNKKNNKIFDDKAIKENKGEGYKKIVYKLLPGANKMLPKVFFSAKSIKFYNPSEDILRIRNHSTHTKNGSPQKGYEKFEFNIEDCRKFIDFYKQSISKHPEWKDFGFRFSDTQRYNSIDEFYREVENQGYKLTFENISESYIDSVVNQGKLYLFQIYNKDFSAYSKGRPNLHTLYWKALFDERNLQDVVYKLNGEAELFYRKQSIPKKITHPAKEAIANKNKDNPKKESVFEYDLIKDKRFTEDKFFFHCPITINFKSSGANKFNDEINLLLKEKANDVHILSIDRGERHLAYYTLVDGKGNIIKQDTFNIIGNDRMKTNYHDKLAAIEKDRDSARKDWKKINNIKEMKEGYLSQVVHEIAKLVIEYNAIVVFEDLNFGFKRGRFKVEKQVYQKLEKMLIEKLNYLVFKDNEFDKTGGVLRAYQLTAPFETFKKMGKQTGIIYYVPAGFTSKICPVTGFVNQLYPKYESVSKSQEFFSKFDKICYNLDKGYFEFSFDYKNFGDKAAKGKWTIASFGSRLINFRNSDKNHNWDTREVYPTKELEKLLKDYSIEYGHGECIKAAICGESDKKFFAKLTSVLNTILQMRNSKTGTELDYLISPVADVNGNFFDSRQAPKNMPQDADANGAYHIGLKGLMLLGRIKNNQEGKKLNLVIKNEEYFEFVQNRNN

SEQ ID NO: 211 - protein, 1300 aa, Francisella tularensis
  REGION 1..1300: note = MISC_FEATURE - Cpf1 D917A polypeptide sequence
  source 1..1300: note = subspecies novicida
MSIYQEFVNKYSLSKTLRFELIPQGKTLENIKARGLILDDEKRAKDYKKAKQIIDKYHQFFIEEILSSVCISEDLLQNYSDVYFKLKKSDDDNLQKDFKSAKDTIKKQISEYIKDSEKFKNLFNQNLIDAKKGQESDLILWLKQSKDNGIELFKANSDITDIDEALEIIKSFKGWTTYFKGFHENRKNVYSSNDIPTSIIYRIVDDNLPKFLENKAKYESLKDKAPEAINYEQIKKDLAEELTFDIDYKTSEVNQRVFSLDEVFEIANFNNYLNQSGITKFNTIIGGKFVNGENTKRKGINEYINLYSQQINDKTLKKYKMSVLFKQILSDTESKSFVIDKLEDDSDVVTTMQSFYEQIAAFKTVEEKSIKETLSLLFDDLKAQKLDLSKIYFKNDKSLTDLSQQVFDDYSVIGTAVLEYITQQIAPKNLDNPSKKEQELIAKKTEKAKYLSLETIKLALEEFNKHRDIDKQCRFEEILANFAAIPMIFDEIAQNKDNLAQISIKYQNQGKKDLLQASAEDDVKAIKDLLDQTNNLLHKLKIFHISQSEDKANILDKDEHFYLVFEECYFELANIVPLYNKIRNYITQKPYSDEKFKLNFENSTLANGWDKNKEPDNTAILFIKDDKYYLGVMNKKNNKIFDDKAIKENKGEGYKKIVYKLLPGANKMLPKVFFSAKSIKFYNPSEDILRIRNHSTHTKNGSPQKGYEKFEFNIEDCRKFIDFYKQSISKHPEWKDFGFRFSDTQRYNSIDEFYREVENQGYKLTFENISESYIDSVVNQGKLYLFQIYNKDFSAYSKGRPNLHTLYWKALFDERNLQDVVYKLNGEAELFYRKQSIPKKITHPAKEAIANKNKDNPKKESVFEYDLIKDKRFTEDKFFFHCPITINFKSSGANKFNDEINLLLKEKANDVHILSIARGERHLAYYTLVDGKGNIIKQDTFNIIGNDRMKTNYHDKLAAIEKDRDSARKDWKKINNIKEMKEGYLSQVVHEIAKLVIEYNAIVVFEDLNFGFKRGRFKVEKQVYQKLEKMLIEKLNYLVFKDNEFDKTGGVLRAYQLTAPFETFKKMGKQTGIIYYVPAGFTSKICPVTGFVNQLYPKYESVSKSQEFFSKFDKICYNLDKGYFEFSFDYKNFGDKAAKGKWTIASFGSRLINFRNSDKNHNWDTREVYPTKELEKLLKDYSIEYGHGECIKAAICGESDKKFFAKLTSVLNTILQMRNSKTGTELDYLISPVADVNGNFFDSRQAPKNMPQDADANGAYHIGLKGLMLLGRIKNNQEGKKLNLVIKNEEYFEFVQNRNN

SEQ ID NO: 212 - protein, 1300 aa, Francisella tularensis
  REGION 1..1300: note = MISC_FEATURE - Cpf1 E1006A polypeptide sequence
  source 1..1300: note = subspecies novicida
MSIYQEFVNKYSLSKTLRFELIPQGKTLENIKARGLILDDEKRAKDYKKAKQIIDKYHQFFIEEILSSVCISEDLLQNYSDVYFKLKKSDDDNLQKDFKSAKDTIKKQISEYIKDSEKFKNLFNQNLIDAKKGQESDLILWLKQSKDNGIELFKANSDITDIDEALEIIKSFKGWTTYFKGFHENRKNVYSSNDIPTSIIYRIVDDNLPKFLENKAKYESLKDKAPEAINYEQIKKDLAEELTFDIDYKTSEVNQRVFSLDEVFEIANFNNYLNQSGITKFNTIIGGKFVNGENTKRKGINEYINLYSQQINDKTLKKYKMSVLFKQILSDTESKSFVIDKLEDDSDVVTTMQSFYEQIAAFKTVEEKSIKETLSLLFDDLKAQKLDLSKIYFKNDKSLTDLSQQVFDDYSVIGTAVLEYITQQIAPKNLDNPSKKEQELIAKKTEKAKYLSLETIKLALEEFNKHRDIDKQCRFEEILANFAAIPMIFDEIAQNKDNLAQISIKYQNQGKKDLLQASAEDDVKAIKDLLDQTNNLLHKLKIFHISQSEDKANILDKDEHFYLVFEECYFELANIVPLYNKIRNYITQKPYSDEKFKLNFENSTLANGWDKNKEPDNTAILFIKDDKYYLGVMNKKNNKIFDDKAIKENKGEGYKKIVYKLLPGANKMLPKVFFSAKSIKFYNPSEDILRIRNHSTHTKNGSPQKGYEKFEFNIEDCRKFIDFYKQSISKHPEWKDFGFRFSDTQRYNSIDEFYREVENQGYKLTFENISESYIDSVVNQGKLYLFQIYNKDFSAYSKGRPNLHTLYWKALFDERNLQDVVYKLNGEAELFYRKQSIPKKITHPAKEAIANKNKDNPKKESVFEYDLIKDKRFTEDKFFFHCPITINFKSSGANKFNDEINLLLKEKANDVHILSIDRGERHLAYYTLVDGKGNIIKQDTFNIIGNDRMKTNYHDKLAAIEKDRDSARKDWKKINNIKEMKEGYLSQVVHEIAKLVIEYNAIVVFADLNFGFKRGRFKVEKQVYQKLEKMLIEKLNYLVFKDNEFDKTGGVLRAYQLTAPFETFKKMGKQTGIIYYVPAGFTSKICPVTGFVNQLYPKYESVSKSQEFFSKFDKICYNLDKGYFEFSFDYKNFGDKAAKGKWTIASFGSRLINFRNSDKNHNWDTREVYPTKELEKLLKDYSIEYGHGECIKAAICGESDKKFFAKLTSVLNTILQMRNSKTGTELDYLISPVADVNGNFFDSRQAPKNMPQDADANGAYHIGLKGLMLLGRIKNNQEGKKLNLVIKNEEYFEFVQNRNN

SEQ ID NO: 213 - protein, 1300 aa, Francisella tularensis
  REGION 1..1300: note = MISC_FEATURE - Cpf1 D1255A polypeptide sequence
  source 1..1300: note = subspecies novicida
MSIYQEFVNKYSLSKTLRFELIPQGKTLENIKARGLILDDEKRAKDYKKAKQIIDKYHQFFIEEILSSVCISEDLLQNYSDVYFKLKKSDDDNLQKDFKSAKDTIKKQISEYIKDSEKFKNLFNQNLIDAKKGQESDLILWLKQSKDNGIELFKANSDITDIDEALEIIKSFKGWTTYFKGFHENRKNVYSSNDIPTSIIYRIVDDNLPKFLENKAKYESLKDKAPEAINYEQIKKDLAEELTFDIDYKTSEVNQRVFSLDEVFEIANFNNYLNQSGITKFNTIIGGKFVNGENTKRKGINEYINLYSQQINDKTLKKYKMSVLFKQILSDTESKSFVIDKLEDDSDVVTTMQSFYEQIAAFKTVEEKSIKETLSLLFDDLKAQKLDLSKIYFKNDKSLTDLSQQVFDDYSVIGTAVLEYITQQIAPKNLDNPSKKEQELIAKKTEKAKYLSLETIKLALEEFNKHRDIDKQCRFEEILANFAAIPMIFDEIAQNKDNLAQISIKYQNQGKKDLLQASAEDDVKAIKDLLDQTNNLLHKLKIFHISQSEDKANILDKDEHFYLVFEECYFELANIVPLYNKIRNYITQKPYSDEKFKLNFENSTLANGWDKNKEPDNTAILFIKDDKYYLGVMNKKNNKIFDDKAIKENKGEGYKKIVYKLLPGANKMLPKVFFSAKSIKFYNPSEDILRIRNHSTHTKNGSPQKGYEKFEFNIEDCRKFIDFYKQSISKHPEWKDFGFRFSDTQRYNSIDEFYREVENQGYKLTFENISESYIDSVVNQGKLYLFQIYNKDFSAYSKGRPNLHTLYWKALFDERNLQDVVYKLNGEAELFYRKQSIPKKITHPAKEAIANKNKDNPKKESVFEYDLIKDKRFTEDKFFFHCPITINFKSSGANKFNDEINLLLKEKANDVHILSIDRGERHLAYYTLVDGKGNIIKQDTFNIIGNDRMKTNYHDKLAAIEKDRDSARKDWKKINNIKEMKEGYLSQVVHEIAKLVIEYNAIVVFEDLNFGFKRGRFKVEKQVYQKLEKMLIEKLNYLVFKDNEFDKTGGVLRAYQLTAPFETFKKMGKQTGIIYYVPAGFTSKICPVTGFVNQLYPKYESVSKSQEFFSKFDKICYNLDKGYFEFSFDYKNFGDKAAKGKWTIASFGSRLINFRNSDKNHNWDTREVYPTKELEKLLKDYSIEYGHGECIKAAICGESDKKFFAKLTSVLNTILQMRNSKTGTELDYLISPVADVNGNFFDSRQAPKNMPQDAAANGAYHIGLKGLMLLGRIKNNQEGKKLNLVIKNEEYFEFVQNRNN

SEQ ID NO: 214 - protein, 1300 aa, Francisella tularensis
  REGION 1..1300: note = MISC_FEATURE - Cpf1 D917A/E1006A polypeptide sequence
  source 1..1300: note = subspecies novicida
MSIYQEFVNKYSLSKTLRFELIPQGKTLENIKARGLILDDEKRAKDYKKAKQIIDKYHQFFIEEILSSVCISEDLLQNYSDVYFKLKKSDDDNLQKDFKSAKDTIKKQISEYIKDSEKFKNLFNQNLIDAKKGQESDLILWLKQSKDNGIELFKANSDITDIDEALEIIKSFKGWTTYFKGFHENRKNVYSSNDIPTSIIYRIVDDNLPKFLENKAKYESLKDKAPEAINYEQIKKDLAEELTFDIDYKTSEVNQRVFSLDEVFEIANFNNYLNQSGITKFNTIIGGKFVNGENTKRKGINEYINLYSQQINDKTLKKYKMSVLFKQILSDTESKSFVIDKLEDDSDVVTTMQSFYEQIAAFKTVEEKSIKETLSLLFDDLKAQKLDLSKIYFKNDKSLTDLSQQVFDDYSVIGTAVLEYITQQIAPKNLDNPSKKEQELIAKKTEKAKYLSLETIKLALEEFNKHRDIDKQCRFEEILANFAAIPMIFDEIAQNKDNLAQISIKYQNQGKKDLLQASAEDDVKAIKDLLDQTNNLLHKLKIFHISQSEDKANILDKDEHFYLVFEECYFELANIVPLYNKIRNYITQKPYSDEKFKLNFENSTLANGWDKNKEPDNTAILFIKDDKYYLGVMNKKNNKIFDDKAIKENKGEGYKKIVYKLLPGANKMLPKVFFSAKSIKFYNPSEDILRIRNHSTHTKNGSPQKGYEKFEFNIEDCRKFIDFYKQSISKHPEWKDFGFRFSDTQRYNSIDEFYREVENQGYKLTFENISESYIDSVVNQGKLYLFQIYNKDFSAYSKGRPNLHTLYWKALFDERNLQDVVYKLNGEAELFYRKQSIPKKITHPAKEAIANKNKDNPKKESVFEYDLIKDKRFTEDKFFFHCPITINFKSSGANKFNDEINLLLKEKANDVHILSIARGERHLAYYTLVDGKGNIIKQDTFNIIGNDRMKTNYHDKLAAIEKDRDSARKDWKKINNIKEMKEGYLSQVVHEIAKLVIEYNAIVVFADLNFGFKRGRFKVEKQVYQKLEKMLIEKLNYLVFKDNEFDKTGGVLRAYQLTAPFETFKKMGKQTGIIYYVPAGFTSKICPVTGFVNQLYPKYESVSKSQEFFSKFDKICYNLDKGYFEFSFDYKNFGDKAAKGKWTIASFGSRLINFRNSDKNHNWDTREVYPTKELEKLLKDYSIEYGHGECIKAAICGESDKKFFAKLTSVLNTILQMRNSKTGTELDYLISPVADVNGNFFDSRQAPKNMPQDADANGAYHIGLKGLMLLGRIKNNQEGKKLNLVIKNEEYFEFVQNRNN

SEQ ID NO: 215 - protein, 1300 aa, Francisella tularensis
  REGION 1..1300: note = MISC_FEATURE - Cpf1 D917A/D1255A polypeptide sequence
  source 1..1300: note = subspecies novicida
MSIYQEFVNKYSLSKTLRFELIPQGKTLENIKARGLILDDEKRAKDYKKAKQIIDKYHQFFIEEILSSVCISEDLLQNYSDVYFKLKKSDDDNLQKDFKSAKDTIKKQISEYIKDSEKFKNLFNQNLIDAKKGQESDLILWLKQSKDNGIELFKANSDITDIDEALEIIKSFKGWTTYFKGFHENRKNVYSSNDIPTSIIYRIVDDNLPKFLENKAKYESLKDKAPEAINYEQIKKDLAEELTFDIDYKTSEVNQRVFSLDEVFEIANFNNYLNQSGITKFNTIIGGKFVNGENTKRKGINEYINLYSQQINDKTLKKYKMSVLFKQILSDTESKSFVIDKLEDDSDVVTTMQSFYEQIAAFKTVEEKSIKETLSLLFDDLKAQKLDLSKIYFKNDKSLTDLSQQVFDDYSVIGTAVLEYITQQIAPKNLDNPSKKEQELIAKKTEKAKYLSLETIKLALEEFNKHRDIDKQCRFEEILANFAAIPMIFDEIAQNKDNLAQISIKYQNQGKKDLLQASAEDDVKAIKDLLDQTNNLLHKLKIFHISQSEDKANILDKDEHFYLVFEECYFELANIVPLYNKIRNYITQKPYSDEKFKLNFENSTLANGWDKNKEPDNTAILFIKDDKYYLGVMNKKNNKIFDDKAIKENKGEGYKKIVYKLLPGANKMLPKVFFSAKSIKFYNPSEDILRIRNHSTHTKNGSPQKGYEKFEFNIEDCRKFIDFYKQSISKHPEWKDFGFRFSDTQRYNSIDEFYREVENQGYKLTFENISESYIDSVVNQGKLYLFQIYNKDFSAYSKGRPNLHTLYWKALFDERNLQDVVYKLNGEAELFYRKQSIPKKITHPAKEAIANKNKDNPKKESVFEYDLIKDKRFTEDKFFFHCPITINFKSSGANKFNDEINLLLKEKANDVHILSIARGERHLAYYTLVDGKGNIIKQDTFNIIGNDRMKTNYHDKLAAIEKDRDSARKDWKKINNIKEMKEGYLSQVVHEIAKLVIEYNAIVVFEDLNFGFKRGRFKVEKQVYQKLEKMLIEKLNYLVFKDNEFDKTGGVLRAYQLTAPFETFKKMGKQTGIIYYVPAGFTSKICPVTGFVNQLYPKYESVSKSQEFFSKFDKICYNLDKGYFEFSFDYKNFGDKAAKGKWTIASFGSRLINFRNSDKNHNWDTREVYPTKELEKLLKDYSIEYGHGECIKAAICGESDKKFFAKLTSVLNTILQMRNSKTGTELDYLISPVADVNGNFFDSRQAPKNMPQDAAANGAYHIGLKGLMLLGRIKNNQEGKKLNLVIKNEEYFEFVQNRNN

SEQ ID NO: 216 - protein, 1300 aa, Francisella tularensis
  REGION 1..1300: note = MISC_FEATURE - Cpf1 E1006A/D1255A polypeptide sequence
  source 1..1300: note = subspecies novicida
MSIYQEFVNKYSLSKTLRFELIPQGKTLENIKARGLILDDEKRAKDYKKAKQIIDKYHQFFIEEILSSVCISEDLLQNYSDVYFKLKKSDDDNLQKDFKSAKDTIKKQISEYIKDSEKFKNLFNQNLIDAKKGQESDLILWLKQSKDNGIELFKANSDITDIDEALEIIKSFKGWTTYFKGFHENRKNVYSSNDIPTSIIYRIVDDNLPKFLENKAKYESLKDKAPEAINYEQIKKDLAEELTFDIDYKTSEVNQRVFSLDEVFEIANFNNYLNQSGITKFNTIIGGKFVNGENTKRKGINEYINLYSQQINDKTLKKYKMSVLFKQILSDTESKSFVIDKLEDDSDVVTTMQSFYEQIAAFKTVEEKSIKETLSLLFDDLKAQKLDLSKIYFKNDKSLTDLSQQVFDDYSVIGTAVLEYITQQIAPKNLDNPSKKEQELIAKKTEKAKYLSLETIKLALEEFNKHRDIDKQCRFEEILANFAAIPMIFDEIAQNKDNLAQISIKYQNQGKKDLLQASAEDDVKAIKDLLDQTNNLLHKLKIFHISQSEDKANILDKDEHFYLVFEECYFELANIVPLYNKIRNYITQKPYSDEKFKLNFENSTLANGWDKNKEPDNTAILFIKDDKYYLGVMNKKNNKIFDDKAIKENKGEGYKKIVYKLLPGANKMLPKVFFSAKSIKFYNPSEDILRIRNHSTHTKNGSPQKGYEKFEFNIEDCRKFIDFYKQSISKHPEWKDFGFRFSDTQRYNSIDEFYREVENQGYKLTFENISESYIDSVVNQGKLYLFQIYNKDFSAYSKGRPNLHTLYWKALFDERNLQDVVYKLNGEAELFYRKQSIPKKITHPAKEAIANKNKDNPKKESVFEYDLIKDKRFTEDKFFFHCPITINFKSSGANKFNDEINLLLKEKANDVHILSIDRGERHLAYYTLVDGKGNIIKQDTFNIIGNDRMKTNYHDKLAAIEKDRDSARKDWKKINNIKEMKEGYLSQVVHEIAKLVIEYNAIVVFADLNFGFKRGRFKVEKQVYQKLEKMLIEKLNYLVFKDNEFDKTGGVLRAYQLTAPFETFKKMGKQTGIIYYVPAGFTSKICPVTGFVNQLYPKYESVSKSQEFFSKFDKICYNLDKGYFEFSFDYKNFGDKAAKGKWTIASFGSRLINFRNSDKNHNWDTREVYPTKELEKLLKDYSIEYGHGECIKAAICGESDKKFFAKLTSVLNTILQMRNSKTGTELDYLISPVADVNGNFFDSRQAPKNMPQDAAANGAYHIGLKGLMLLGRIKNNQEGKKLNLVIKNEEYFEFVQNRNN

SEQ ID NO: 217 - protein, 1300 aa, Francisella tularensis
  REGION 1..1300: note = MISC_FEATURE - Cpf1 D917A/E1006A/D1255A polypeptide sequence
  source 1..1300: note = subspecies novicida
MSIYQEFVNKYSLSKTLRFELIPQGKTLENIKARGLILDDEKRAKDYKKAKQIIDKYHQFFIEEILSSVCISEDLLQNYSDVYFKLKKSDDDNLQKDFKSAKDTIKKQISEYIKDSEKFKNLFNQNLIDAKKGQESDLILWLKQSKDNGIELFKANSDITDIDEALEIIKSFKGWTTYFKGFHENRKNVYSSNDIPTSIIYRIVDDNLPKFLENKAKYESLKDKAPEAINYEQIKKDLAEELTFDIDYKTSEVNQRVFSLDEVFEIANFNNYLNQSGITKFNTIIGGKFVNGENTKRKGINEYINLYSQQINDKTLKKYKMSVLFKQILSDTESKSFVIDKLEDDSDVVTTMQSFYEQIAAFKTVEEKSIKETLSLLFDDLKAQKLDLSKIYFKNDKSLTDLSQQVFDDYSVIGTAVLEYITQQIAPKNLDNPSKKEQELIAKKTEKAKYLSLETIKLALEEFNKHRDIDKQCRFEEILANFAAIPMIFDEIAQNKDNLAQISIKYQNQGKKDLLQASAEDDVKAIKDLLDQTNNLLHKLKIFHISQSEDKANILDKDEHFYLVFEECYFELANIVPLYNKIRNYITQKPYSDEKFKLNFENSTLANGWDKNKEPDNTAILFIKDDKYYLGVMNKKNNKIFDDKAIKENKGEGYKKIVYKLLPGANKMLPKVFFSAKSIKFYNPSEDILRIRNHSTHTKNGSPQKGYEKFEFNIEDCRKFIDFYKQSISKHPEWKDFGFRFSDTQRYNSIDEFYREVENQGYKLTFENISESYIDSVVNQGKLYLFQIYNKDFSAYSKGRPNLHTLYWKALFDERNLQDVVYKLNGEAELFYRKQSIPKKITHPAKEAIANKNKDNPKKESVFEYDLIKDKRFTEDKFFFHCPITINFKSSGANKFNDEINLLLKEKANDVHILSIARGERHLAYYTLVDGKGNIIKQDTFNIIGNDRMKTNYHDKLAAIEKDRDSARKDWKKINNIKEMKEGYLSQVVHEIAKLVIEYNAIVVFADLNFGFKRGRFKVEKQVYQKLEKMLIEKLNYLVFKDNEFDKTGGVLRAYQLTAPFETFKKMGKQTGIIYYVPAGFTSKICPVTGFVNQLYPKYESVSKSQEFFSKFDKICYNLDKGYFEFSFDYKNFGDKAAKGKWTIASFGSRLINFRNSDKNHNWDTREVYPTKELEKLLKDYSIEYGHGECIKAAICGESDKKFFAKLTSVLNTILQMRNSKTGTELDYLISPVADVNGNFFDSRQAPKNMPQDAAANGAYHIGLKGLMLLGRIKNNQEGKKLNLVIKNEEYFEFVQNRNN

SEQ ID NO: 218 - protein, 1052 aa, Staphylococcus aureus
  REGION 1..1052: note = MISC_FEATURE - Exemplary SaCas9 polypeptide sequence
KRNYILGLDIGITSVGYGIIDYETRDVIDAGVRLFKEANVENNEGRRSKRGARRLKRRRRHRIQRVKKLLFDYNLLTDHSELSGINPYEARVKGLSQKLSEEEFSAALLHLAKRRGVHNVNEVEEDTGNELSTKEQISRNSKALEEKYVAELQLERLKKDGEVRGSINRFKTSDYVKEAKQLLKVQKAYHQLDQSFIDTYIDLLETRRTYYEGPGEGSPFGWKDIKEWYEMLMGHCTYFPEELRSVKYAYNADLYNALNDLNNLVITRDENEKLEYYEKFQIIENVFKQKKKPTLKQIAKEILVNEEDIKGYRVTSTGKPEFTNLKVYHDIKDITARKEIIENAELLDQIAKILTIYQSSEDIQEELTNLNSELTQEEIEQISNLKGYTGTHNLSLKAINLILDELWHTNDNQIAIFNRLKLVPKKVDLSQQKEIPTTLVDDFILSPVVKRSFIQSIKVINAIIKKYGLPNDIIIELAREKNSKDAQKMINEMQKRNRQTNERIEEIIRTTGKENAKYLIEKIKLHDMQEGKCLYSLEAIPLEDLLNNPFNYEVDHIIPRSVSFDNSFNNKVLVKQEENSKKGNRTPFQYLSSSDSKISYETFKKHILNLAKGKGRISKTKKEYLLEERDINRFSVQKDFINRNLVDTRYATRGLMNLLRSYFRVNNLDVKVKSINGGFTSFLRRKWKFKKERNKGYKHHAEDALIIANADFIFKEWKKLDKAKKVMENQMFEEKQAESMPEIETEQEYKEIFITPHQIKHIKDFKDYKYSHRVDKKPNRELINDTLYSTRKDDKGNTLIVNNLNGLYDKDNDKLKKLINKSPEKLLMYHHDPQTYQKLKLIMEQYGDEKNPLYKYYEETGNYLTKYSKKDNGPVIKKIKYYGNKLNAHLDITDDYPNSRNKVVKLSLKPYRFDVYLDNGVYKFVTVKNLDVIKKENYYEVNSKCYEEAKKLKKISNQAEFIASFYNNDLIKINGELYRVIGVNNDLLNRIEVNMIDITYREYLENMNDKRPPRIIKTIASKTQSIKKYSTDILGNLYEVKSKKHPQIIKKG

SEQ ID NO: 219 - protein, 1052 aa, Staphylococcus aureus
  REGION 1..1052: note = MISC_FEATURE - SaCas9n polypeptide sequence
KRNYILGLDIGITSVGYGIIDYETRDVIDAGVRLFKEANVENNEGRRSKRGARRLKRRRRHRIQRVKKLLFDYNLLTDHSELSGINPYEARVKGLSQKLSEEEFSAALLHLAKRRGVHNVNEVEEDTGNELSTKEQISRNSKALEEKYVAELQLERLKKDGEVRGSINRFKTSDYVKEAKQLLKVQKAYHQLDQSFIDTYIDLLETRRTYYEGPGEGSPFGWKDIKEWYEMLMGHCTYFPEELRSVKYAYNADLYNALNDLNNLVITRDENEKLEYYEKFQIIENVFKQKKKPTLKQIAKEILVNEEDIKGYRVTSTGKPEFTNLKVYHDIKDITARKEIIENAELLDQIAKILTIYQSSEDIQEELTNLNSELTQEEIEQISNLKGYTGTHNLSLKAINLILDELWHTNDNQIAIFNRLKLVPKKVDLSQQKEIPTTLVDDFILSPVVKRSFIQSIKVINAIIKKYGLPNDIIIELAREKNSKDAQKMINEMQKRNRQTNERIEEIIRTTGKENAKYLIEKIKLHDMQEGKCLYSLEAIPLEDLLNNPFNYEVDHIIPRSVSFDNSFNNKVLVKQEEASKKGNRTPFQYLSSSDSKISYETFKKHILNLAKGKGRISKTKKEYLLEERDINRFSVQKDFINRNLVDTRYATRGLMNLLRSYFRVNNLDVKVKSINGGFTSFLRRKWKFKKERNKGYKHHAEDALIIANADFIFKEWKKLDKAKKVMENQMFEEKQAESMPEIETEQEYKEIFITPHQIKHIKDFKDYKYSHRVDKKPNRELINDTLYSTRKDDKGNTLIVNNLNGLYDKDNDKLKKLINKSPEKLLMYHHDPQTYQKLKLIMEQYGDEKNPLYKYYEETGNYLTKYSKKDNGPVIKKIKYYGNKLNAHLDITDDYPNSRNKVVKLSLKPYRFDVYLDNGVYKFVTVKNLDVIKKENYYEVNSKCYEEAKKLKKISNQAEFIASFYNNDLIKINGELYRVIGVNNDLLNRIEVNMIDITYREYLENMNDKRPPRIIKTIASKTQSIKKYSTDILGNLYEVKSKKHPQIIKKG

SEQ ID NO: 220 - protein, 1052 aa, Staphylococcus aureus
  REGION 1..1052: note = MISC_FEATURE - SaKKH Cas9 polypeptide sequence
KRNYILGLDIGITSVGYGIIDYETRDVIDAGVRLFKEANVENNEGRRSKRGARRLKRRRRHRIQRVKKLLFDYNLLTDHSELSGINPYEARVKGLSQKLSEEEFSAALLHLAKRRGVHNVNEVEEDTGNELSTKEQISRNSKALEEKYVAELQLERLKKDGEVRGSINRFKTSDYVKEAKQLLKVQKAYHQLDQSFIDTYIDLLETRRTYYEGPGEGSPFGWKDIKEWYEMLMGHCTYFPEELRSVKYAYNADLYNALNDLNNLVITRDENEKLEYYEKFQIIENVFKQKKKPTLKQIAKEILVNEEDIKGYRVTSTGKPEFTNLKVYHDIKDITARKEIIENAELLDQIAKILTIYQSSEDIQEELTNLNSELTQEEIEQISNLKGYTGTHNLSLKAINLILDELWHTNDNQIAIFNRLKLVPKKVDLSQQKEIPTTLVDDFILSPVVKRSFIQSIKVINAIIKKYGLPNDIIIELAREKNSKDAQKMINEMQKRNRQTNERIEEIIRTTGKENAKYLIEKIKLHDMQEGKCLYSLEAIPLEDLLNNPFNYEVDHIIPRSVSFDNSFNNKVLVKQEEASKKGNRTPFQYLSSSDSKISYETFKKHILNLAKGKGRISKTKKEYLLEERDINRFSVQKDFINRNLVDTRYATRGLMNLLRSYFRVNNLDVKVKSINGGFTSFLRRKWKFKKERNKGYKHHAEDALIIANADFIFKEWKKLDKAKKVMENQMFEEKQAESMPEIETEQEYKEIFITPHQIKHIKDFKDYKYSHRVDKKPNRKLINDTLYSTRKDDKGNTLIVNNLNGLYDKDNDKLKKLINKSPEKLLMYHHDPQTYQKLKLIMEQYGDEKNPLYKYYEETGNYLTKYSKKDNGPVIKKIKYYGNKLNAHLDITDDYPNSRNKVVKLSLKPYRFDVYLDNGVYKFVTVKNLDVIKKENYYEVNSKCYEEAKKLKKISNQAEFIASFYKNDLIKINGELYRVIGVNNDLLNRIEVNMIDITYREYLENMNDKRPPHIIKTIASKTQSIKKYSTDILGNLYEVKSKKHPQIIKKG

SEQ ID NO: 221 - protein, 707 aa, synthetic construct
  REGION 1..707: note = Casphi-1 polypeptide sequence
MADTPTLFTQFLRHHLPGQRFRKDILKQAGRILANKGEDATIAFLRGKSEESPPDFQPPVKCPIIACSRPLTEWPIYQASVAIQGYVYGQSLAEFEASDPGCSKDGLLGWFDKTGVCTDYFSVQGLNLIFQNARKRYIGVQTKVTNRNEKRHKKLKRINAKRIAEGLPELTSDEPESALDETGHLIDPPGLNTNIYCYQQVSPKPLALSEVNQLPTAYAGYSTSGDDPIQPMVTKDRLSISKGQPGYIPEHQRALLSQKKHRRMRGYGLKARALLVIVRIQDDWAVIDLRSLLRNAYWRRIVQTKEPSTITKLLKLVTGDPVLDATRMVATFTYKPGIVQVRSAKCLKNKQGSKLFSERYLNETVSVTSIDLGSNNLVAVATYRLVNGNTPELLQRFTLPSHLVKDFERYKQAHDTLEDSIQKTAVASLPQGQQTEIRMWSMYGFREAQERVCQELGLADGSIPWNVMTATSTILTDLFLARGGDPKKCMFTSEPKKKKNSKQVLYKIRDRAWAKMYRTLLSKETREAWNKALWGLKRGSPDYARLSKRKEELARRCVNYTISTAEKRAQCGRTIVALEDLNIGFFHGRGKQEPGWVGLFTRKKENRWLMQALHKAFLELAHHRGYHVIEVNPAYTSQTCPVCRHCDPDNRDQHNREAFHCIGCGFRGNADLDVATHNIAMVAITGESLKRARGSVASKTPQPLAAE

SEQ ID NO: 222 - protein, 757 aa, synthetic construct
  REGION 1..757: note = Casphi-2 polypeptide sequence
MPKPAVESEFSKVLKKHFPGERFRSSYMKRGGKILAAQGEEAVVAYLQGKSEEEPPNFQPPAKCHVVTKSRDFAEWPIMKASEAIQRYIYALSTTERAACKPGKSSESHAAWFAATGVSNHGYSHVQGLNLIFDHTLGRYDGVLKKVQLRNEKARARLESINASRADEGLPEIKAEEEEVATNETGHLLQPPGINPSFYVYQTISPQAYRPRDEIVLPPEYAGYVRDPNAPIPLGVVRNRCDIQKGCPGYIPEWQREAGTAISPKTGKAVTVPGLSPKKNKRMRRYWRSEKEKAQDALLVTVRIGTDWVVIDVRGLLRNARWRTIAPKDISLNALLDLFTGDPVIDVRRNIVTFTYTLDACGTYARKWTLKGKQTKATLDKLTATQTVALVAIDLGQTNPISAGISRVTQENGALQCEPLDRFTLPDDLLKDISAYRIAWDRNEEELRARSVEALPEAQQAEVRALDGVSKETARTQLCADFGLDPKRLPWDKMSSNTTFISEALLSNSVSRDQVFFTPAPKKGAKKKAPVEVMRKDRTWARAYKPRLSVEAQKLKNEALWALKRTSPEYLKLSRRKEELCRRSINYVIEKTRRRTQCQIVIPVIEDLNVRFFHGSGKRLPGWDNFFTAKKENRWFIQGLHKAFSDLRTHRSFYVFEVRPERTSITCPKCGHCEVGNRDGEAFQCLSCGKTCNADLDVATHNLTQVALTGKTMPKREEPRDAQGTAPARKTKKASKSKAPPAEREDQTPAQEPSQTS

SEQ ID NO: 223 - protein, 766 aa, synthetic construct
  REGION 1..766: note = Casphi-3 polypeptide sequence
MEKEITELTKIRREFPNKKFSSTDMKKAGKLLKAEGPDAVRDFLNSCQEIIGDFKPPVKTNIVSISRPFEEWPVSMVGRAIQEYYFSLTKEELESVHPGTSSEDHKSFFNITGLSNYNYTSVQGLNLIFKNAKAIYDGTLVKANNKNKKLEKKFNEINHKRSLEGLPIITPDFEEPFDENGHLNNPPGINRNIYGYQGCAAKVFVPSKHKMVSLPKEYEGYNRDPNLSLAGFRNRLEIPEGEPGHVPWFQRMDIPEGQIGHVNKIQRFNFVHGKNSGKVKFSDKTGRVKRYHHSKYKDATKPYKFLEESKKVSALDSILAIITIGDDWVVFDIRGLYRNVFYRELAQKGLTAVQLLDLFTGDPVIDPKKGVVTFSYKEGVVPVFSQKIVPRFKSRDTLEKLTSQGPVALLSVDLGQNEPVAARVCSLKNINDKITLDNSCRISFLDDYKKQIKDYRDSLDELEIKIRLEAINSLETNQQVEIRDLDVFSADRAKANTVDMFDIDPNLISWDSMSDARVSTQISDLYLKNGGDESRVYFEINNKRIKRSDYNISQLVRPKLSDSTRKNLNDSIWKLKRTSEEYLKLSKRKLELSRAVVNYTIRQSKLLSGINDIVIILEDLDVKKKFNGRGIRDIGWDNFFSSRKENRWFIPAFHKAFSELSSNRGLCVIEVNPAWTSATCPDCGFCSKENRDGINFTCRKCGVSYHADIDVATLNIARVAVLGKPMSGPADRERLGDTKKPRVARSRKTMKRKDISNSTVEAMVTA

SEQ ID NO: 224 - protein, 765 aa, synthetic construct
  REGION 1..765: note = Casphi-4 polypeptide sequence
MYSLEMADLKSEPSLLAKLLRDRFPGKYWLPKYWKLAEKKRLTGGEEAACEYMADKQLDSPPPNFRPPARCVILAKSRPFEDWPVHRVASKAQSFVIGLSEQGFAALRAAPPSTADARRDWLRSHGASEDDLMALEAQLLETIMGNAISLHGGVLKKIDNANVKAAKRLSGRNEARLNKGLQELPPEQEGSAYGADGLLVNPPGLNLNIYCRKSCCPKPVKNTARFVGHYPGYLRDSDSILISGTMDRLTIIEGMPGHIPAWQREQGLVKPGGRRRRLSGSESNMRQKVDPSTGPRRSTRSGTVNRSNQRTGRNGDPLLVEIRMKEDWVLLDARGLLRNLRWRESKRGLSCDHEDLSLSGLLALFSGDPVIDPVRNEVVFLYGEGIIPVRSTKPVGTRQSKKLLERQASMGPLTLISCDLGQTNLIAGRASAISLTHGSLGVRSSVRIELDPEIIKSFERLRKDADRLETEILTAAKETLSDEQRGEVNSHEKDSPQTAKASLCRELGLHPPSLPWGQMGPSTTFIADMLISHGRDDDAFLSHGEFPTLEKRKKFDKRFCLESRPLLSSETRKALNESLWEVKRTSSEYARLSQRKKEMARRAVNFVVEISRRKTGLSNVIVNIEDLNVRIFHGGGKQAPGWDGFFRPKSENRWFIQAIHKAFSDLAAHHGIPVIESDPQRTSMTCPECGHCDSKNRNGVRFLCKGCGASMDADFDAACRNLERVALTGKPMPKPSTSCERLLSATTGKVCSDHSLSHDAIEKAS

SEQ ID NO: 225 - protein, 793 aa, synthetic construct
  REGION 1..793: note = Casphi-5 polypeptide sequence
MSSLPTPLELLKQKHADLFKGLQFSSKDNKMAGKVLKKDGEEAALAFLSERGVSRGELPNFRPPAKTLVVAQSRPFEEFPIYRVSEAIQLYVYSLSVKELETVPSGSSTKKEHQRFFQDSSVPDFGYTSVQGLNKIFGLARGIYLGVITRGENQLQKAKSKHEALNKKRRASGEAETEFDPTPYEYMTPERKLAKPPGVNHSIMCYVDISVDEFDFRNPDGIVLPSEYAGYCREINTAIEKGTVDRLGHLKGGPGYIPGHQRKESTTEGPKINFRKGRIRRSYTALYAKRDSRRVRQGKLALPSYRHHMMRLNSNAESAILAVIFFGKDWVVFDLRGLLRNVRWRNLFVDGSTPSTLLGMFGDPVIDPKRGVVAFCYKEQIVPVVSKSITKMVKAPELLNKLYLKSEDPLVLVAIDLGQTNPVGVGVYRVMNASLDYEVVTRFALESELLREIESYRQRTNAFEAQIRAETFDAMTSEEQEEITRVRAFSASKAKENVCHRFGMPVDAVDWATMGSNTIHIAKWVMRHGDPSLVEVLEYRKDNEIKLDKNGVPKKVKLTDKRIANLTSIRLRFSQETSKHYNDTMWELRRKHPVYQKLSKSKADFSRRVVNSIIRRVNHLVPRARIVFIIEDLKNLGKVFHGSGKRELGWDSYFEPKSENRWFIQVLHKAFSETGKHKGYYIIECWPNWTSCTCPKCSCCDSENRHGEVFRCLACGYTCNTDFGTAPDNLVKIATTGKGLPGPKKRCKGSSKGKNPKIARSSETGVSVTESGAPKVKKSSPTQTSQSSSQSAP

SEQ ID NO: 226 - protein, 441 aa, synthetic construct
  REGION 1..441: note = Casphi-6 polypeptide sequence
MNKIEKEKTPLAKLMNENFAGLRFPFAIIKQAGKKLLKEGELKTIEYMTGKGSIEPLPNFKPPVKCLIVAKRRDLKYFPICKASCEIQSYVYSLNYKDFMDYFSTPMTSQKQHEEFFKKSGLNIEYQNVAGLNLIFNNVKNTYNGVILKVKNRNEKLKKKAIKNNYEFEEIKTFNDDGCLINKPGINNVIYCFQSISPKILKNITHLPKEYNDYDCSVDRNIIQKYVSRLDIPESQPGHVPEWQRKLPEFNNTNNPRRRRKWYSNGRNISKGYSVDQVNQAKIEDSLLAQIKIGEDWIILDIRGLLRDLNRRELISYKNKLTIKDVLGFFSDYPIIDIKKNLVTFCYKEGVIQVVSQKSIGNKKSKQLLEKLIENKPIALVSIDLGQTNPVSVKISKLNKINNKISIESFTYRFLNEEILKEIEKYRKDYDKLELKLINEA

SEQ ID NO: 227 - protein, 772 aa, synthetic construct
  REGION 1..772: note = Casphi-7 polypeptide sequence
MSNTAVSTREHMSNKTTPPSPLSLLLRAHFPGLKFESQDYKIAGKKLRDGGPEAVISYLTGKGQAKLKDVKPPAKAFVIAQSRPFIEWDLVRVSRQIQEKIFGIPATKGRPKQDGLSETAFNEAVASLEVDGKSKLNEETRAAFYEVLGLDAPSLHAQAQNALIKSAISIREGVLKKVENRNEKNLSKTKRRKEAGEEATFVEEKAHDERGYLIHPPGVNQTIPGYQAVVIKSCPSDFIGLPSGCLAKESAEALTDYLPHDRMTIPKGQPGYVPEWQHPLLNRRKNRRRRDWYSASLNKPKATCSKRSGTPNRKNSRTDQIQSGRFKGAIPVLMRFQDEWVIIDIRGLLRNARYRKLLKEKSTIPDLLSLFTGDPSIDMRQGVCTFIYKAGQACSAKMVKTKNAPEILSELTKSGPVVLVSIDLGQTNPIAAKVSRVTQLSDGQLSHETLLRELLSNDSSDGKEIARYRVASDRLRDKLANLAVERLSPEHKSEILRAKNDTPALCKARVCAALGLNPEMIAWDKMTPYTEFLATAYLEKGGDRKVATLKPKNRPEMLRRDIKFKGTEGVRIEVSPEAAEAYREAQWDLQRTSPEYLRLSTWKQELTKRILNQLRHKAAKSSQCEVVVMAFEDLNIKMMHGNGKWADGGWDAFFIKKRENRWFMQAFHKSLTELGAHKGVPTIEVTPHRTSITCTKCGHCDKANRDGERFACQKCGFVAHADLEIATDNIERVALTGKPMPKPESERSGDAKKSVGARKAAFKPEEDAEAAE

SEQ ID NO: 228 - protein, 717 aa, synthetic construct
  REGION 1..717: note = Casphi-8 polypeptide sequence
MIKPTVSQFLTPGFKLIRNHSRTAGLKLKNEGEEACKKFVRENEIPKDECPNFQGGPAIANIIAKSREFTEWEIYQSSLAIQEVIFTLPKDKLPEPILKEEWRAQWLSEHGLDTVPYKEAAGLNLIIKNAVNTYKGVQVKVDNKNKNNLAKINRKNEIAKLNGEQEISFEEIKAFDDKGYLLQKPSPNKSIYCYQSVSPKPFITSKYHNVNLPEEYIGYYRKSNEPIVSPYQFDRLRIPIGEPGYVPKWQYTFLSKKENKRRKLSKRIKNVSPILGIICIKKDWCVFDMRGLLRTNHWKKYHKPTDSINDLFDYFTGDPVIDTKANVVRFRYKMENGIVNYKPVREKKGKELLENICDQNGSCKLATVDVGQNNPVAIGLFELKKVNGELTKTLISRHPTPIDFCNKITAYRERYDKLESSIKLDAIKQLTSEQKIEVDNYNNNFTPQNTKQIVCSKLNINPNDLPWDKMISGTHFISEKAQVSNKSEIYFTSTDKGKTKDVMKSDYKWFQDYKPKLSKEVRDALSDIEWRLRRESLEFNKLSKSREQDARQLANWISSMCDVIGIENLVKKNNFFGGSGKREPGWDNFYKPKKENRWWINAIHKALTELSQNKGKRVILLPAMRTSITCPKCKYCDSKNRNGEKFNCLKCGIELNADIDVATENLATVAITAQSMPKPTCERSGDAKKPVRARKAKAPEFHDKLAPSYTVVLREAV

SEQ ID NO: 229 - protein, 793 aa, synthetic construct
  REGION 1..793: note = Casphi-9 polypeptide sequence
MRSSREIGDKILMRQPAEKTAFQVFRQEVIGTQKLSGGDAKTAGRLYKQGKMEAAREWLLKGARDDVPPNFQPPAKCLVVAVSHPFEEWDISKTNHDVQAYIYAQPLQAEGHLNGLSEKWEDTSADQHKLWFEKTGVPDRGLPVQAINKIAKAAVNRAFGVVRKVENRNEKRRSRDNRIAEHNRENGLTEVVREAPEVATNADGFLLHPPGIDPSILSYASVSPVPYNSSKHSFVRLPEEYQAYNVEPDAPIPQFVVEDRFAIPPGQPGYVPEWQRLKCSTNKHRRMRQWSNQDYKPKAGRRAKPLEFQAHLTRERAKGALLVVMRIKEDWVVFDVRGLLRNVEWRKVLSEEAREKLTLKGLLDLFTGDPVIDTKRGIVTFLYKAEITKILSKRTVKTKNARDLLLRLTEPGEDGLRREVGLVAVDLGQTHPIAAAIYRIGRTSAGALESTVLHRQGLREDQKEKLKEYRKRHTALDSRLRKEAFETLSVEQQKEIVTVSGSGAQITKDKVCNYLGVDPSTLPWEKMGSYTHFISDDFLRRGGDPNIVHFDRQPKKGKVSKKSQRIKRSDSQWVGRMRPRLSQETAKARMEADWAAQNENEEYKRLARSKQELARWCVNTLLQNTRCITQCDEIVVVIEDLNVKSLHGKGAREPGWDNFFTPKTENRWFIQILHKTFSELPKHRGEHVIEGCPLRTSITCPACSYCDKNSRNGEKFVCVACGATFHADFEVATYNLVRLATTGMPMPKSLERQGGGEKAGGARKARKKAKQVEKIVVQANANVTMNGASLHSP

SEQ ID NO: 230 - protein, 812 aa, synthetic construct
  REGION 1..812: note = Casphi-10 polypeptide sequence
MDMLDTETNYATETPAQQQDYSPKPPKKAQRAPKGFSKKARPEKKPPKPITLFTQKHFSGVRFLKRVIRDASKILKLSESRTITFLEQAIERDGSAPPDVTPPVHNTIMAVTRPFEEWPEVILSKALQKHCYALTKKIKIKTWPKKGPGKKCLAAWSARTKIPLIPGQVQATNGLFDRIGSIYDGVEKKVTNRNANKKLEYDEAIKEGRNPAVPEYETAYNIDGTLINKPGYNPNLYITQSRTPRLITEADRPLVEKILWQMVEKKTQSRNQARRARLEKAAHLQGLPVPKFVPEKVDRSQKIEIRIIDPLDKIEPYMPQDRMAIKASQDGHVPYWQRPFLSKRRNRRVRAGWGKQVSSIQAWLTGALLVIVRLGNEAFLADIRGALRNAQWRKLLKPDATYQSLFNLFTGDPVVNTRTNHLTMAYREGVVNIVKSRSFKGRQTREHLLTLLGQGKTVAGVSFDLGQKHAAGLLAAHFGLGEDGNPVFTPIQACFLPQRYLDSLTNYRNRYDALTLDMRRQSLLALTPAQQQEFADAQRDPGGQAKRACCLKLNLNPDEIRWDLVSGISTMISDLYIERGGDPRDVHQQVETKPKGKRKSEIRILKIRDGKWAYDFRPKIADETRKAQREQLWKLQKASSEFERLSRYKINIARAIANWALQWGRELSGCDIVIPVLEDLNVGSKFFDGKGKWLLGWDNRFTPKKENRWFIKVLHKAVAELAPHRGVPVYEVMPHRTSMTCPACHYCHPTNREGDRFECQSCHVVKNTDRDVAPYNILRVAVEGKTLDRWQAEKKPQAEPDRPMILIDNQES

SEQ ID NO: 231 - protein, 84 aa, synthetic construct
  REGION 1..84: note = synthetic polypeptide sequence
MTNLSDIIEKETGKQLVIQESILMLPEEVEEVIGNKPESDILVHTAYDESTDENVMLLTSDAPEYKPWALVIQDSNGENKIKML

SEQ ID NO: 232 - protein, 1129 aa, Alicyclobacillus acidoterrestris
  REGION 1..1129: note = MISC_FEATURE - Cas12b/C2c1; sp|T0D7A2|C2C1_ALIAG CRISPR-associated endonuclease C2c1 OS = Alicyclobacillus acido-terrestris (strain ATCC 49025 /DSM 3922/ CIP 106132 / NCIMB 13137/GD3B) GN=c2c1 PE=1 SV=1; Cas12b/C2c1 polypeptide sequence
MAVKSIKVKLRLDDMPEIRAGLWKLHKEVNAGVRYYTEWLSLLRQENLYRRSPNGDGEQECDKTAEECKAELLERLRARQVENGHRGPAGSDDELLQLARQLYELLVPQAIGAKGDAQQIARKFLSPLADKDAVGGLGIAKAGNKPRWVRMREAGEPGWEEEKEKAETRKSADRTADVLRALADFGLKPLMRVYTDSEMSSVEWKPLRKGQAVRTWDRDMFQQAIERMMSWESWNQRVGQEYAKLVEQKNRFEQKNFVGQEHLVHLVNQLQQDMKEASPGLESKEQTAHYVTGRALRGSDKVFEKWGKLAPDAPFDLYDAEIKNVQRRNTRRFGSHDLFAKLAEPEYQALWREDASFLTRYAVYNSILRKLNHAKMFATFTLPDATAHPIWTRFDKLGGNLHQYTFLFNEFGERRHAIRFHKLLKVENGVAREVDDVTVPISMSEQLDNLLPRDPNEPIALYFRDYGAEQHFTGEFGGAKIQCRRDQLAHMHRRRGARDVYLNVSVRVQSQSEARGERRPPYAAVFRLVGDNHRAFVHFDKLSDYLAEHPDDGKLGSEGLLSGLRVMSVDLGLRTSASISVFRVARKDELKPNSKGRVPFFFPIKGNDNLVAVHERSQLLKLPGETESKDLRAIREERQRTLRQLRTQLAYLRLLVRCGSEDVGRRERSWAKLIEQPVDAANHMTPDWREAFENELQKLKSLHGICSDKEWMDAVYESVRRVWRHMGKQVRDWRKDVRSGERPKIRGYAKDVVGGNSIEQIEYLERQYKFLKSWSFFGKVSGQVIRAEKGSRFAITLREHIDHAKEDRLKKLADRIIMEALGYVYALDERGKGKWVAKYPPCQLILLEELSEYQFNNDRPPSENNQLMQWSHRGVFQELINQAQVHDLLVGTMYAAFSSRFDARTGAPGIRCRRVPARCTQEHNPEPFPWWLNKFVVEHTLDACPLRADDLIPTGEGEIFVSPFSAEEGDFHQIHADLNAAQNLQQRLWSDFDISQIRLRCDWGEVDGELVLIPRLTGKRTADSYSNKVFYTNTGVTYYERERGKKRRKVFAQEKLSEEEAELLVEADEAREKSVVLMRDPSGIINRGNWTRQKEFWSMVNQRIEGYLVKQIRSRVPLQDSACENTGDI

SEQ ID NO: 233 - protein, 1368 aa, Mus musculus
  REGION 1..1368: note = MISC_FEATURE - high fidelity Cas9 polypeptide sequence
MDKKYSIGLAIGTNSVGWAVITDEYKVPSKKFKVLGNTDRHSIKKNLIGALLFDSGETAEATRLKRTARRRYTRRKNRICYLQEIFSNEMAKVDDSFFHRLEESFLVEEDKKHERHPIFGNIVDEVAYHEKYPTIYHLRKKLVDSTDKADLRLIYLALAHMIKFRGHFLIEGDLNPDNSDVDKLFIQLVQTYNQLFEENPINASGVDAKAILSARLSKSRRLENLIAQLPGEKKNGLFGNLIALSLGLTPNFKSNFDLAEDAKLQLSKDTYDDDLDNLLAQIGDQYADLFLAAKNLSDAILLSDILRVNTEITKAPLSASMIKRYDEHHQDLTLLKALVRQQLPEKYKEIFFDQSKNGYAGYIDGGASQEEFYKFIKPILEKMDGTEELLVKLNREDLLRKQRTFDNGSIPHQIHLGELHAILRRQEDFYPFLKDNREKIEKILTFRIPYYVGPLARGNSRFAWMTRKSEETITPWNFEEVVDKGASAQSFIERMTAFDKNLPNEKVLPKHSLLYEYFTVYNELTKVKYVTEGMRKPAFLSGEQKKAIVDLLFKTNRKVTVKQLKEDYFKKIECFDSVEISGVEDRFNASLGTYHDLLKIIKDKDFLDNEENEDILEDIVLTLTLFEDREMIEERLKTYAHLFDDKVMKQLKRRRYTGWGALSRKLINGIRDKQSGKTILDFLKSDGFANRNFMALIHDDSLTFKEDIQKAQVSGQGDSLHEHIANLAGSPAIKKGILQTVKVVDELVKVMGRHKPENIVIEMARENQTTQKGQKNSRERMKRIEEGIKELGSQILKEHPVENTQLQNEKLYLYYLQNGRDMYVDQELDINRLSDYDVDHIVPQSFLKDDSIDNKVLTRSDKNRGKSDNVPSEEVVKKMKNYWRQLLNAKLITQRKFDNLTKAERGGLSELDKAGFIKRQLVETRAITKHVAQILDSRMNTKYDENDKLIREVKVITLKSKLVSDFRKDFQFYKVREINNYHHAHDAYLNAVVGTALIKKYPKLESEFVYGDYKVYDVRKMIAKSEQEIGKATAKYFFYSNIMNFFKTEITLANGEIRKRPLIETNGETGEIVWDKGRDFATVRKVLSMPQVNIVKKTEVQTGGFSKESILPKRNSDKLIARKKDWDPKKYGGFDSPTVAYSVLVVAKVEKGKSKKLKSVKELLGITIMERSSFEKNPIDFLEAKGYKEVKKDLIIKLPKYSLFELENGRKRMLASAGELQKGNELALPSKYVNFLYLASHYEKLKGSPEDNEQKQLFVEQHKHYLDEIIEQISEFSKRVILADANLDKVLSAYNKHRDKPIREQAENIIHLFTLTNLGAPAAFKYFDTTIDRKRYTSTKEVLDATLIHQSITGLYETRIDLSQLGGD

SEQ ID NO: 234 - protein, 1368 aa, Streptococcus pyogenes
  REGION 1..1368: note = MISC_FEATURE - PAM-binding SpEQR Cas9 polypeptide sequence
MDKKYSIGLAIGTNSVGWAVITDEYKVPSKKFKVLGNTDRHSIKKNLIGALLFDSGETAEATRLKRTARRRYTRRKNRICYLQEIFSNEMAKVDDSFFHRLEESVLVEEDKKHERHPIFGNIVDEVAYHEKYPTIYHLRKKLVDSTDKADLRLIYLALAHMIKFRGHFLIEGDLNPDNSDVDKLFIQLVQTYNQLFEENPINASGVDAKAILSARLSKSRRLENLIAQLPGEKKNGLFGNLIALSLGLTPNFKSNFDLAEDAKLQLSKDTYDDDLDNLLAQIGDQYADLFLAAKNLSDAILLSDILRVNTEITKAPLSASMIKRYDEHHQDLTLLKALVRQQLPEKYKEIFFDQSKNGYAGYIDGGASQEEFYKFIKPILEKMDGTEELLVKLNREDLLRKQRTFDNGSIPHQIHLGELHAILRRQEDFYPFLKDNREKIEKILTFRIPYYVGPLARGNSRFAWMTRKSEETITPWNFEEVVDKGASAQSFIERMTNFDKNLPNEKVLPKHSLLYEYFTVYNELTKVKYVTEGMRKPAFLSGEQKKAIVDLLFKTNRKVTVKQLKEDYFKKIECFDSVEISGVEDRFNASLGTYHDLLKIIKDKDFLDNEENEDILEDIVLTLTLFEDREMIEERLKTYAHLFDDKVMKQLKRRRYTGWGRLSRKLINGIRDKQSGKTILDFLKSDGFANRNFMQLIHDDSLTFKEDIQKAQVSGQGDSLHEHIANLAGSPAIKKGILQTVKVVDELVKVMGRHKPENIVIEMARENQTTQKGQKNSRERMKRIEEGIKELGSQILKEHPVENTQLQNEKLYLYYLQNGRDMYVDQELDINRLSDYDVDHIVPQSFLKDDSIDNKVLTRSDKNRGKSDNVPSEEVVKKMKNYWRQLLNAKLITQRKFDNLTKAERGGLSELDKAGFIKRQLVETRQITKHVAQILDSRMNTKYDENDKLIREVKVITLKSKLVSDFRKDFQFYKVREINNYHHAHDAYLNAVVGTALIKKYPKLESEFVYGDYKVYDVRKMIAKSEQEIGKATAKYFFYSNIMNFFKTEITLANGEIRKRPLIETNGETGEIVWDKGRDFATVRKVLSMPQVNIVKKTEVQTGGFSKESILPKRNSDKLIARKKDWDPKKYGGFESPTVAYSVLVVAKVEKGKSKKLKSVKELLGITIMERSSFEKNPIDFLEAKGYKEVKKDLIIKLPKYSLFELENGRKRMLASAGELQKGNELALPSKYVNFLYLASHYEKLKGSPEDNEQKQLFVEQHKHYLDEIIEQISEFSKRVILADANLDKVLSAYNKHRDKPIREQAENIIHLFTLTNLGAPAAFKYFDTTIDRKQYRSTKEVLDATLIHQSITGLYETRIDLSQLGGD

SEQ ID NO: 235 - protein, 1368 aa, Streptococcus pyogenes
  REGION 1..1368: note = MISC_FEATURE - PAM-binding SpVQR Cas9 polypeptide sequence
MDKKYSIGLAIGTNSVGWAVITDEYKVPSKKFKVLGNTDRHSIKKNLIGALLFDSGETAEATRLKRTARRRYTRRKNRICYLQEIFSNEMAKVDDSFFHRLEESFLVEEDKKHERHPIFGNIVDEVAYHEKYPTIYHLRKKLVDSTDKADLRLIYLALAHMIKFRGHFLIEGDLNPDNSDVDKLFIQLVQTYNQLFEENPINASGVDAKAILSARLSKSRRLENLIAQLPGEKKNGLFGNLIALSLGLTPNFKSNFDLAEDAKLQLSKDTYDDDLDNLLAQIGDQYADLFLAAKNLSDAILLSDILRVNTEITKAPLSASMIKRYDEHHQDLTLLKALVRQQLPEKYKEIFFDQSKNGYAGYIDGGASQEEFYKFIKPILEKMDGTEELLVKLNREDLLRKQRTFDNGSIPHQIHLGELHAILRRQEDFYPFLKDNREKIEKILTFRIPYYVGPLARGNSRFAWMTRKSEETITPWNFEEVVDKGASAQSFIERMTNFDKNLPNEKVLPKHSLLYEYFTVYNELTKVKYVTEGMRKPAFLSGEQKKAIVDLLFKTNRKVTVKQLKEDYFKKIECFDSVEISGVEDRFNASLGTYHDLLKIIKDKDFLDNEENEDILEDIVLTLTLFEDREMIEERLKTYAHLFDDKVMKQLKRRRYTGWGRLSRKLINGIRDKQSGKTILDFLKSDGFANRNFMQLIHDDSLTFKEDIQKAQVSGQGDSLHEHIANLAGSPAIKKGILQTVKVVDELVKVMGRHKPENIVIEMARENQTTQKGQKNSRERMKRIEEGIKELGSQILKEHPVENTQLQNEKLYLYYLQNGRDMYVDQELDINRLSDYDVDHIVPQSFLKDDSIDNKVLTRSDKNRGKSDNVPSEEVVKKMKNYWRQLLNAKLITQRKFDNLTKAERGGLSELDKAGFIKRQLVETRQITKHVAQILDSRMNTKYDENDKLIREVKVITLKSKLVSDFRKDFQFYKVREINNYHHAHDAYLNAVVGTALIKKYPKLESEFVYGDYKVYDVRKMIAKSEQEIGKATAKYFFYSNIMNFFKTEITLANGEIRKRPLIETNGETGEIVWDKGRDFATVRKVLSMPQVNIVKKTEVQTGGFSKESILPKRNSDKLIARKKDWDPKKYGGFVSPTVAYSVLVVAKVEKGKSKKLKSVKELLGITIMERSSFEKNPIDFLEAKGYKEVKKDLIIKLPKYSLFELENGRKRMLASAGELQKGNELALPSKYVNFLYLASHYEKLKGSPEDNEQKQLFVEQHKHYLDEIIEQISEFSKRVILADANLDKVLSAYNKHRDKPIREQAENIIHLFTLTNLGAPAAFKYFDTTIDRKQYRSTKEVLDATLIHQSITGLYETRIDLSQLGGD

SEQ ID NO: 236 - protein, 1368 aa, Streptococcus pyogenes
  REGION 1..1368: note = MISC_FEATURE - SpVQR Cas9 polypeptide sequence
MDKKYSIGLAIGTNSVGWAVITDEYKVPSKKFKVLGNTDRHSIKKNLIGALLFDSGETAEATRLKRTARRRYTRRKNRICYLQEIFSNEMAKVDDSFFHRLEESFLVEEDKKHERHPIFGNIVDEVAYHEKYPTIYHLRKKLVDSTDKADLRLIYLALAHMIKFRGHFLIEGDLNPDNSDVDKLFIQLVQTYNQLFEENPINASGVDAKAILSARLSKSRRLENLIAQLPGEKKNGLFGNLIALSLGLTPNFKSNFDLAEDAKLQLSKDTYDDDLDNLLAQIGDQYADLFLAAKNLSDAILLSDILRVNTEITKAPLSASMIKRYDEHHQDLTLLKALVRQQLPEKYKEIFFDQSKNGYAGYIDGGASQEEFYKFIKPILEKMDGTEELLVKLNREDLLRKQRTFDNGSIPHQIHLGELHAILRRQEDFYPFLKDNREKIEKILTFRIPYYVGPLARGNSRFAWMTRKSEETITPWNFEEVVDKGASAQSFIERMTNFDKNLPNEKVLPKHSLLYEYFTVYNELTKVKYVTEGMRKPAFLSGEQKKAIVDLLFKTNRKVTVKQLKEDYFKKIECFDSVEISGVEDRFNASLGTYHDLLKIIKDKDFLDNEENEDILEDIVLTLTLFEDREMIEERLKTYAHLFDDKVMKQLKRRRYTGWGRLSRKLINGIRDKQSGKTILDFLKSDGFANRNFMQLIHDDSLTFKEDIQKAQVSGQGDSLHEHIANLAGSPAIKKGILQTVKVVDELVKVMGRHKPENIVIEMARENQTTQKGQKNSRERMKRIEEGIKELGSQILKEHPVENTQLQNEKLYLYYLQNGRDMYVDQELDINRLSDYDVDHIVPQSFLKDDSIDNKVLTRSDKNRGKSDNVPSEEVVKKMKNYWRQLLNAKLITQRKFDNLTKAERGGLSELDKAGFIKRQLVETRQITKHVAQILDSRMNTKYDENDKLIREVKVITLKSKLVSDFRKDFQFYKVREINNYHHAHDAYLNAVVGTALIKKYPKLESEFVYGDYKVYDVRKMIAKSEQEIGKATAKYFFYSNIMNFFKTEITLANGEIRKRPLIETNGETGEIVWDKGRDFATVRKVLSMPQVNIVKKTEVQTGGFSKESILPKRNSDKLIARKKDWDPKKYGGFVSPTVAYSVLVVAKVEKGKSKKLKSVKELLGITIMERSSFEKNPIDFLEAKGYKEVKKDLIIKLPKYSLFELENGRKRMLASARELQKGNELALPSKYVNFLYLASHYEKLKGSPEDNEQKQLFVEQHKHYLDEIIEQISEFSKRVILADANLDKVLSAYNKHRDKPIREQAENIIHLFTLTNLGAPAAFKYFDTTIDRKEYRSTKEVLDATLIHQSITGLYETRIDLSQLGGD

SEQ ID NO: 237 - protein, 1359 aa, Streptococcus macacae
  REGION 1..1359: note = MISC_FEATURE - SpyMacCas9 polypeptide sequence
MDKKYSIGLDIGTNSVGWAVITDDYKVPSKKFKVLGNTDRHSIKKNLIGALLFGSGETAEATRLKRTARRRYTRRKNRICYLQEIFSNEMAKVDDSFFHRLEESFLVEEDKKHERHPIFGNIVDEVAYHEKYPTIYHLRKKLADSTDKADLRLIYLALAHMIKFRGHFLIEGDLNPDNSDVDKLFIQLVQIYNQLFEENPINASRVDAKAILSARLSKSRRLENLIAQLPGEKRNGLFGNLIALSLGLTPNFKSNFDLAEDAKLQLSKDTYDDDLDNLLAQIGDQYADLFLAAKNLSDAILLSDILRVNSEITKAPLSASMIKRYDEHHQDLTLLKALVRQQLPEKYKEIFFDQSKNGYAGYIDGGASQEEFYKFIKPILEKMDGTEELLVKLNREDLLRKQRTFDNGSIPHQIHLGELHAILRRQEDFYPFLKDNREKIEKILTFRIPYYVGPLARGNSRFAWMTRKSEETITPWNFEEVVDKGASAQSFIERMTNFDKNLPNEKVLPKHSLLYEYFTVYNELTKVKYVTEGMRKPAFLSGEQKKAIVDLLFKTNRKVTVKQLKEDYFKKIECFDSVEISGVEDRFNASLGAYHDLLKIIKDKDFLDNEENEDILEDIVLTLTLFEDRGMIEERLKTYAHLFDDKVMKQLKRRRYTGWGRLSRKLINGIRDKQSGKTILDFLKSDGFANRNFMQLIHDDSLTFKEDIQKAQVSGQGHSLHEQIANLAGSPAIKKGILQTVKIVDELVKVMGHKPENIVIEMARENQTTQKGQKNSRERMKRIEEGIKELGSQILKEHPVENTQLQNEKLYLYYLQNGRDMYVDQELDINRLSDYDVDHIVPQSFIKDDSIDNKVLTRSDKNRGKSDNVPSEEVVKKMKNYWRQLLNAKLITQRKFDNLTKAERGGLSELDKAGFIKRQLVETRQITKHVAQILDSRMNTKYDENDKLIREVKVITLKSKLVSDFRKDFQFYKVREINNYHHAHDAYLNAVVGTALIKKYPKLESEFVYGDYKVYDVRKMIAKSEQEIGKATAKYFFYSNIMNFFKTEITLANGEIRKRPLIETNGETGEIVWDKGRDFATVRKVLSMPQVNIVKKTEIQTVGQNGGLFDDNPKSPLEVTPSKLVPLKKELNPKKYGGYQKPTTAYPVLLITDTKQLIPISVMNKKQFEQNPVKFLRDRGYQQVGKNDFIKLPKYTLVDIGDGIKRLWASSKEIHKGNQLVVSKKSQILLYHAHHLDSDLSNDYLQNHNQQFDVLFNEIISFSKKCKLGKEHIQKIENVYSNKKNSASIEELAESFIKLLGFTQLGATSPFNFLGVKLNQKQYKGKKDYILPCTEGTLIRQSITGLYETRVDLSKIGED

SEQ ID NO: 238 - protein, 1410 aa, synthetic construct
  REGION 1..1410: note = CP5 polypeptide sequence
  REGION 1..341: note = MISC_FEATURE - Sequence derived from Cas9
  REGION 342..362: note = MISC_FEATURE - Linker sequence
  REGION 363..1388: note = MISC_FEATURE - Sequence derived from Cas9
  REGION 1389..1410: note = MISC_FEATURE - Bipartite nuclear localization sequence
EIGKATAKYFFYSNIMNFFKTEITLANGEIRKRPLIETNGETGEIVWDKGRDFATVRKVLSMPQVNIVKKTEVQTGGFSKESILPKRNSDKLIARKKDWDPKKYGGFMQPTVAYSVLVVAKVEKGKSKKLKSVKELLGITIMERSSFEKNPIDFLEAKGYKEVKKDLIIKLPKYSLFELENGRKRMLASAKFLQKGNELALPSKYVNFLYLASHYEKLKGSPEDNEQKQLFVEQHKHYLDEIIEQISEFSKRVILADANLDKVLSAYNKHRDKPIREQAENIIHLFTLTNLGAPRAFKYFDTTIARKEYRSTKEVLDATLIHQSITGLYETRIDLSQLGGDGGSGGSGGSGGSGGSGGSGGMDKKYSIGLAIGTNSVGWAVITDEYKVPSKKFKVLGNTDRHSIKKNLIGALLFDSGETAEATRLKRTARRRYTRRKNRICYLQEIFSNEMAKVDDSFFHRLEESFLVEEDKKHERHPIFGNIVDEVAYHEKYPTIYHLRKKLVDSTDKADLRLIYLALAHMIKFRGHFLIEGDLNPDNSDVDKLFIQLVQTYNQLFEENPINASGVDAKAILSARLSKSRRLENLIAQLPGEKKNGLFGNLIALSLGLTPNFKSNFDLAEDAKLQLSKDTYDDDLDNLLAQIGDQYADLFLAAKNLSDAILLSDILRVNTEITKAPLSASMIKRYDEHHQDLTLLKALVRQQLPEKYKEIFFDQSKNGYAGYIDGGASQEEFYKFIKPILEKMDGTEELLVKLNREDLLRKQRTFDNGSIPHQIHLGELHAILRRQEDFYPFLKDNREKIEKILTFRIPYYVGPLARGNSRFAWMTRKSEETITPWNFEEVVDKGASAQSFIERMTNFDKNLPNEKVLPKHSLLYEYFTVYNELTKVKYVTEGMRKPAFLSGEQKKAIVDLLFKTNRKVTVKQLKEDYFKKIECFDSVEISGVEDRFNASLGTYHDLLKIIKDKDFLDNEENEDILEDIVLTLTLFEDREMIEERLKTYAHLFDDKVMKQLKRRRYTGWGRLSRKLINGIRDKQSGKTILDFLKSDGFANRNFMQLIHDDSLTFKEDIQKAQVSGQGDSLHEHIANLAGSPAIKKGILQTVKVVDELVKVMGRHKPENIVIEMARENQTTQKGQKNSRERMKRIEEGIKELGSQILKEHPVENTQLQNEKLYLYYLQNGRDMYVDQELDINRLSDYDVDHIVPQSFLKDDSIDNKVLTRSDKNRGKSDNVPSEEVVKKMKNYWRQLLNAKLITQRKFDNLTKAERGGLSELDKAGFIKRQLVETRQITKHVAQILDSRMNTKYDENDKLIREVKVITLKSKLVSDFRKDFQFYKVREINNYHHAHDAYLNAVVGTALIKKYPKLESEFVYGDYKVYDVRKMIAKSEQEGADKRTADGSEFESPKKKRKV

SEQ ID NO: 239 - protein, 1302 aa, synthetic construct
  REGION 1..1302: note = Cas12c1 polypeptide sequence
MQTKKTHLHLISAKASRKYRRTIACLSDTAKKDLERRKQSGAADPAQELSCLKTIKFKLEVPEGSKLPSFDRISQIYNALETIEKGSLSYLLFALILSGFRIFPNSSAAKTFASSSCYKNDQFASQIKEIFGEMVKNFIPSELESILKKGRRKNNKDWTEENIKRVLNSEFGRKNSEGSSALFDSFLSKFSQELFRKFDSWNEVNKKYLEAAELLDSMLASYGPFDSVCKMIGDSDSRNSLPDKSTIAFTNNAEITVDIESSVMPYMAIAALLREYRQSKSKAAPVAYVQSHLTTTNGNGLSWFFKFGLDLIRKAPVSSKQSTSDGSKSLQELFSVPDDKLDGLKFIKEACEALPEASLLCGEKGELLGYQDFRTSFAGHIDSWVANYVNRLFELIELVNQLPESIKLPSILTQKNHNLVASLGLQEAEVSHSLELFEGLVKNVRQTLKKLAGIDISSSPNEQDIKEFYAFSDVLNRLGSIRNQIENAVQTAKKDKIDLESAIEWKEWKKLKKLPKLNGLGGGVPKQQELLDKALESVKQIRHYQRIDFERVIQWAVNEHCLETVPKFLVDAEKKKINKESSTDFAAKENAVRFLLEGIGAAARGKTDSVSKAAYNWFVVNNFLAKKDLNRYFINCQGCIYKPPYSKRRSLAFALRSDNKDTIEVVWEKFETFYKEISKEIEKFNIFSQEFQTFLHLENLRMKLLLRRIQKPIPAEIAFFSLPQEYYDSLPPNVAFLALNQEITPSEYITQFNLYSSFLNGNLILLRRSRSYLRAKFSWVGNSKLIYAAKEARLWKIPNAYWKSDEWKMILDSNVLVFDKAGNVLPAPTLKKVCEREGDLRLFYPLLRQLPHDWCYRNPFVKSVGREKNVIEVNKEGEPKVASALPGSLFRLIGPAPFKSLLDDCFFNPLDKDLRECMLIVDQEISQKVEAQKVEASLESCTYSIAVPIRYHLEEPKVSNQFENVLAIDQGEAGLAYAVFSLKSIGEAETKPIAVGTIRIPSIRRLIHSVSTYRKKKQRLQNFKQNYDSTAFIMRENVTGDVCAKIVGLMKEFNAFPVLEYDVKNLESGSRQLSAVYKAVNSHFLYFKEPGRDALRKQLWYGGDSWTIDGIEIVTRERKEDGKEGVEKIVPLKVFPGRSVSARFTSKTCSCCGRNVFDWLFTEKKAKTNKKFNVNSKGELTTADGVIQLFEADRSKGPKFYARRKERTPLTKPIAKGSYSLEEIERRVRTNLRRAPKSKQSRDTSQSQYFCVYKDCALHFSGMQADENAAINIGRRFLTALRKNRRSDFPSNVKISDRLLDN

SEQ ID NO: 240 - protein, 1218 aa, synthetic construct
  REGION 1..1218: note = Cas12c2 polypeptide sequence
MTKHSIPLHAFRNSGADARKWKGRIALLAKRGKETMRTLQFPLEMSEPEAAAINTTPFAVAYNAIEGTGKGTLFDYWAKLHLAGFRFFPSGGAATIFRQQAVFEDASWNAAFCQQSGKDWPWLVPSKLYERFTKAPREVAKKDGSKKSIEFTQENVANESHVSLVGASITDKTPEDQKEFFLKMAGALAEKFDSWKSANEDRIVAMKVIDEFLKSEGLHLPSLENIAVKCSVETKPDNATVAWHDAPMSGVQNLAIGVFATCASRIDNIYDLNGGKLSKLIQESATTPNVTALSWLFGKGLEYFRTTDIDTIMQDFNIPASAKESIKPLVESAQAIPTMTVLGKKNYAPFRPNFGGKIDSWIANYASRLMLLNDILEQIEPGFELPQALLDNETLMSGIDMTGDELKELIEAVYAWVDAAKQGLATLLGRGGNVDDAVQTFEQFSAMMDTLNGTLNTISARYVRAVEMAGKDEARLEKLIECKFDIPKWCKSVPKLVGISGGLPKVEEEIKVMNAAFKDVRARMFVRFEEIAAYVASKGAGMDVYDALEKRELEQIKKLKSAVPERAHIQAYRAVLHRIGRAVQNCSEKTKQLFSSKVIEMGVFKNPSHLNNFIFNQKGAIYRSPFDRSRHAPYQLHADKLLKNDWLELLAEISATLMASESTEQMEDALRLERTRLQLQLSGLPDWEYPASLAKPDIEVEIQTALKMQLAKDTVTSDVLQRAFNLYSSVLSGLTFKLLRRSFSLKMRFSVADTTQLIYVPKVCDWAIPKQYLQAEGEIGIAARVVTESSPAKMVTEVEMKEPKALGHFMQQAPHDWYFDASLGGTQVAGRIVEKGKEVGKERKLVGYRMRGNSAYKTVLDKSLVGNTELSQCSMIIEIPYTQTVDADFRAQVQAGLPKVSINLPVKETITASNKDEQMLFDRFVAIDLGERGLGYAVFDAKTLELQESGHRPIKAITNLLNRTHHYEQRPNQRQKFQAKFNVNLSELRENTVGDVCHQINRICAYYNAFPVLEYMVPDRLDKQLKSVYESVTNRYIWSSTDAHKSARVQFWLGGETWEHPYLKSAKDKKPLVLSPGRGASGKGTSQTCSCCGRNPFDLIKDMKPRAKIAVVDGKAKLENSELKLFERNLESKDDMLARRHRNERAGMEQPLTPGNYTVDEIKALLRANLRRAPKNRRTKDTTVSEYHCVFSDCGKTMHADENAAVNIGGKFIADIEK

SEQ ID NO: 241 - protein, 1252 aa, Oleiphilus sp.
  REGION 1..1252: note = MISC_FEATURE - OspCas12c polypeptide sequence
MTKLRHRQKKLTHDWAGSKKREVLGSNGKLQNPLLMPVKKGQVTEFRKAFSAYARATKGEMTDGRKNMFTHSFEPFKTKPSLHQCELADKAYQSLHSYLPGSLAHFLLSAHALGFRIFSKSGEATAFQASSKIEAYESKLASELACVDLSIQNLTISTLFNALTTSVRGKGEETSADPLIARFYTLLTGKPLSRDTQGPERDLAEVISRKIASSFGTWKEMTANPLQSLQFFEEELHALDANVSLSPAFDVLIKMNDLQGDLKNRTIVFDPDAPVFEYNAEDPADIIIKLTARYAKEAVIKNQNVGNYVKNAITTTNANGLGWLLNKGLSLLPVSTDDELLEFIGVERSHPSCHALIELIAQLEAPELFEKNVFSDTRSEVQGMIDSAVSNHIARLSSSRNSLSMDSEELERLIKSFQIHTPHCSLFIGAQSLSQQLESLPEALQSGVNSADILLGSTQYMLTNSLVEESIATYQRTLNRINYLSGVAGQINGAIKRKAIDGEKIHLPAAWSELISLPFIGQPVIDVESDLAHLKNQYQTLSNEFDTLISALQKNFDLNFNKALLNRTQHFEAMCRSTKKNALSKPEIVSYRDLLARLTSCLYRGSLVLRRAGIEVLKKHKIFESNSELREHVHERKHFVFVSPLDRKAKKLLRLTDSRPDLLHVIDEILQHDNLENKDRESLWLVRSGYLLAGLPDQLSSSFINLPIITQKGDRRLIDLIQYDQINRDAFVMLVTSAFKSNLSGLQYRANKQSFVVTRTLSPYLGSKLVYVPKDKDWLVPSQMFEGRFADILQSDYMVWKDAGRLCVIDTAKHLSNIKKSVFSSEEVLAFLRELPHRTFIQTEVRGLGVNVDGIAFNNGDIPSLKTFSNCVQVKVSRTNTSLVQTLNRWFEGGKVSPPSIQFERAYYKKDDQIHEDAAKRKIRFQMPATELVHASDDAGWTPSYLLGIDPGEYGMGLSLVSINNGEVLDSGFIHINSLINFASKKSNHQTKVVPRQQYKSPYANYLEQSKDSAAGDIAHILDRLIYKLNALPVFEALSGNSQSAADQVWTKVLSFYTWGDNDAQNSIRKQHWFGASHWDIKGMLRQPPTEKKPKPYIAFPGSQVSSYGNSQRCSCCGRNPIEQLREMAKDTSIKELKIRNSEIQLFDGTIKLFNPDPSTVIERRRHNLGPSRIPVADRTFKNISPSSLEFKELITIVSRSIRHSPEFIAKKRGIGSEYFCAYSDCNSSLNSEANAAANVAQKFQKQLFFEL

SEQ ID NO: 242 - protein, 767 aa, synthetic construct
  REGION 1..767: note = Cas12g1 polypeptide sequence
MAQASSTPAVSPRPRPRYREERTLVRKLLPRPGQSKQEFRENVKKLRKAFLQFNADVSGVCQWAIQFRPRYGKPAEPTETFWKFFLEPETSLPPNDSRSPEFRRLQAFEAAAGINGAAALDDPAFTNELRDSILAVASRPKTKEAQRLFSRLKDYQPAHRMILAKVAAEWIESRYRRAHQNWERNYEEWKKEKQEWEQNHPELTPEIREAFNQIFQQLEVKEKRVRICPAARLLQNKDNCQYAGKNKHSVLCNQFNEFKKNHLQGKAIKFFYKDAEKYLRCGLQSLKPNVQGPFREDWNKYLRYMNLKEETLRGKNGGRLPHCKNLGQECEFNPHTALCKQYQQQLSSRPDLVQHDELYRKWRREYWREPRKPVFRYPSVKRHSIAKIFGENYFQADFKNSVVGLRLDSMPAGQYLEFAFAPWPRNYRPQPGETEISSVHLHFVGTRPRIGFRFRVPHKRSRFDCTQEELDELRSRTFPRKAQDQKFLEAARKRLLETFPGNAEQELRLLAVDLGTDSARAAFFIGKTFQQAFPLKIVKIEKLYEQWPNQKQAGDRRDASSKQPRPGLSRDHVGRHLQKMRAQASEIAQKRQELTGTPAPETTTDQAAKKATLQPFDLRGLTVHTARMIRDWARLNARQIIQLAEENQVDLIVLESLRGFRPPGYENLDQEKKRRVAFFAHGRIRRKVTEKAVERGMRVVTVPYLASSKVCAECRKKQKDNKQWEKNKKRGLFKCEGCGSQAQVDENAARVLGRVFWGEIELPTAIP

SEQ ID NO: 243 - protein, 870 aa, synthetic construct
  REGION 1..870: note = Cas12h1 polypeptide sequence
MKVHEIPRSQLLKIKQYEGSFVEWYRDLQEDRKKFASLLFRWAAFGYAAREDDGATYISPSQALLERRLLLGDAEDVAIKFLDVLFKGGAPSSSCYSLFYEDFALRDKAKYSGAKREFIEGLATMPLDKIIERIRQDEQLSKIPAEEWLILGAEYSPEEIWEQVAPRIVNVDRSLGKQLRERLGIKCRRPHDAGYCKILMEVVARQLRSHNETYHEYLNQTHEMKTKVANNLTNEFDLVCEFAEVLEEKNYGLGWYVLWQGVKQALKEQKKPTKIQIAVDQLRQPKFAGLLTAKWRALKGAYDTWKLKKRLEKRKAFPYMPNWDNDYQIPVGLTGLGVFTLEVKRTEVVVDLKEHGKLFCSHSHYFGDLTAEKHPSRYHLKFRHKLKLRKRDSRVEPTIGPWIEAALREITIQKKPNGVFYLGLPYALSHGIDNFQIAKRFFSAAKPDKEVINGLPSEMVVGAADLNLSNIVAPVKARIGKGLEGPLHALDYGYGELIDGPKILTPDGPRCGELISLKRDIVEIKSAIKEFKACQREGLTMSEETTTWLSEVESPSDSPRCMIQSRIADTSRRLNSFKYQMNKEGYQDLAEALRLLDAMDSYNSLLESYQRMHLSPGEQSPKEAKFDTKRASFRDLLRRRVAHTIVEYFDDCDIVFFEDLDGPSDSDSRNNALVKLLSPRTLLLYIRQALEKRGIGMVEVAKDGTSQNNPISGHVGWRNKQNKSEIYFYEDKELLVMDADEVGAMNILCRGLNHSVCPYSFVTKAPEKKNDEKKEGDYGKRVKRFLKDRYGSSNVRFLVASMGFVTVTTKRPKDALVGKRLYYHGGELVTHDLHNRMKDEIKYLVEKEVLARRVSLSDSTIKSYKSFAHV

SEQ ID NO: 244 - protein, 1093 aa, synthetic construct
  REGION 1..1093: note = Cas12i1 polypeptide sequence
MSNKEKNASETRKAYTTKMIPRSHDRMKLLGNFMDYLMDGTPIFFELWNQFGGGIDRDIISGTANKDKISDDLLLAVNWFKVMPINSKPQGVSPSNLANLFQQYSGSEPDIQAQEYFASNFDTEKHQWKDMRVEYERLLAELQLSRSDMHHDLKLMYKEKCIGLSLSTAHYITSVMFGTGAKNNRQTKHQFYSKVIQLLEESTQINSVEQLASIILKAGDCDSYRKLRIRCSRKGATPSILKIVQDYELGTNHDDEVNVPSLIANLKEKLGRFEYECEWKCMEKIKAFLASKVGPYYLGSYSAMLENALSPIKGMTTKNCKFVLKQIDAKNDIKYENEPFGKIVEGFFDSPYFESDTNVKWVLHPHHIGESNIKTLWEDLNAIHSKYEEDIASLSEDKKEKRIKVYQGDVCQTINTYCEEVGKEAKTPLVQLLRYLYSRKDDIAVDKIIDGITFLSKKHKVEKQKINPVIQKYPSFNFGNNSKLLGKIISPKDKLKHNLKCNRNQVDNYIWIEIKVLNTKTMRWEKHHYALSSTRFLEEVYYPATSENPPDALAARFRTKTNGYEGKPALSAEQIEQIRSAPVGLRKVKKRQMRLEAARQQNLLPRYTWGKDFNINICKRGNNFEVTLATKVKKKKEKNYKVVLGYDANIVRKNTYAAIEAHANGDGVIDYNDLPVKPIESGFVTVESQVRDKSYDQLSYNGVKLLYCKPHVESRRSFLEKYRNGTMKDNRGNNIQIDFMKDFEAIADDETSLYYFNMKYCKLLQSSIRNHSSQAKEYREEIFELLRDGKLSVLKLSSLSNLSFVMFKVAKSLIGTYFGHLLKKPKNSKSDVKAPPITDEDKQKADPEMFALRLALEEKRLNKVKSKKEVIANKIVAKALELRDKYGPVLIKGENISDTTKKGKKSSTNSFLMDWLARGVANKVKEMVMMHQGLEFVEVNPNFTSHQDPFVHKNPENTFRARYSRCTPSELTEKNRKEILSFLSDKPSKRPTNAYYNEGAMAFLATYGLKKNDVLGVSLEKFKQIMANILHQRSEDQLLFPSRGGMFYLATYKLDADATSVNWNGKQFWVCNADLVAAYNVGLVDIQKDFKKK

SEQ ID NO: 245 - protein, 1054 aa, synthetic construct
  REGION 1..1054: note = Cas12i2 polypeptide sequence
MSSAIKSYKSVLRPNERKNQLLKSTIQCLEDGSAFFFKMLQGLFGGITPEIVRFSTEQEKQQQDIALWCAVNWFRPVSQDSLTHTIASDNLVEKFEEYYGGTASDAIKQYFSASIGESYYWNDCRQQYYDLCRELGVEVSDLTHDLEILCREKCLAVATESNQNNSIISVLFGTGEKEDRSVKLRITKKILEAISNLKEIPKNVAPIQEIILNVAKATKETFRQVYAGNLGAPSTLEKFIAKDGQKEFDLKKLQTDLKKVIRGKSKERDWCCQEELRSYVEQNTIQYDLWAWGEMFNKAHTALKIKSTRNYNFAKQRLEQFKEIQSLNNLLVVKKLNDFFDSEFFSGEETYTICVHHLGGKDLSKLYKAWEDDPADPENAIVVLCDDLKNNFKKEPIRNILRYIFTIRQECSAQDILAAAKYNQQLDRYKSQKANPSVLGNQGFTWTNAVILPEKAQRNDRPNSLDLRIWLYLKLRHPDGRWKKHHIPFYDTRFFQEIYAAGNSPVDTCQFRTPRFGYHLPKLTDQTAIRVNKKHVKAAKTEARIRLAIQQGTLPVSNLKITEISATINSKGQVRIPVKFDVGRQKGTLQIGDRFCGYDQNQTASHAYSLWEVVKEGQYHKELGCFVRFISSGDIVSITENRGNQFDQLSYEGLAYPQYADWRKKASKFVSLWQITKKNKKKEIVTVEAKEKFDAICKYQPRLYKFNKEYAYLLRDIVRGKSLVELQQIRQEIFRFIEQDCGVTRLGSLSLSTLETVKAVKGIIYSYFSTALNASKNNPISDEQRKEFDPELFALLEKLELIRTRKKKQKVERIANSLIQTCLENNIKFIRGEGDLSTTNNATKKKANSRSMDWLARGVFNKIRQLAPMHNITLFGCGSLYTSHQDPLVHRNPDKAMKCRWAAIPVKDIGDWVLRKLSQNLRAKNIGTGEYYHQGVKEFLSHYELQDLEEELLKWRSDRKSNIPCWVLQNRLAEKLGNKEAVVYIPVRGGRIYFATHKVATGAVSIVFDQKQVWVCNADHVAAANIALTVKGIGEQSSDEENPDGSRIKLQLTS

SEQ ID NO: 246 - protein, 4 aa, synthetic construct
  REGION 1..4: note = synthetic peptide sequence
GGGS

SEQ ID NO: 247 - protein, 5 aa, synthetic construct
  REGION 1..5: note = synthetic peptide sequence
GGGGS

SEQ ID NO: 248 - protein, 5 aa, synthetic construct
  REGION 1..5: note = synthetic peptide sequence
EAAAK

SEQ ID NO: 249 - protein, 16 aa, synthetic construct
  REGION 1..16: note = synthetic peptide sequence
SGSETPGTSESATPES

SEQ ID NO: 250 - protein, 6 aa, synthetic construct
  REGION 1..6: note = linker peptide sequence
GGSGGS

SEQ ID NO: 251 - protein, 20 aa, synthetic construct
  REGION 1..20: note = synthetic peptide sequence
GSSGSETPGTSESATPESSG

SEQ ID NO: 252 - DNA, 18 bp, synthetic construct
  misc_feature 1..18: note = synthetic oligonucleotide sequence
  source 1..18: mol_type = other DNA
ggaggctctggaggaagc

SEQ ID NO: 253 - DNA, 60 bp, synthetic construct
  misc_feature 1..60: note = synthetic oligonucleotide sequence
  source 1..60: mol_type = other DNA
ggctcttctggatctgaaacacctggcacaagcgagagcgccacccctgagagctctggc

SEQ ID NO: 254 - protein, 1129 aa, Alicyclobacillus acidiphilus
  REGION 1..1129: note = MISC_FEATURE - AacCas12b polypeptide sequence
MAVKSMKVKLRLDNMPEIRAGLWKLHTEVNAGVRYYTEWLSLLRQENLYRRSPNGDGEQECYKTAEECKAELLERLRARQVENGHCGPAGSDDELLQLARQLYELLVPQAIGAKGDAQQIARKFLSPLADKDAVGGLGIAKAGNKPRWVRMREAGEPGWEEEKAKAEARKSTDRTADVLRALADFGLKPLMRVYTDSDMSSVQWKPLRKGQAVRTWDRDMFQQAIERMMSWESWNQRVGEAYAKLVEQKSRFEQKNFVGQEHLVQLVNQLQQDMKEASHGLESKEQTAHYLTGRALRGSDKVFEKWEKLDPDAPFDLYDTEIKNVQRRNTRRFGSHDLFAKLAEPKYQALWREDASFLTRYAVYNSIVRKLNHAKMFATFTLPDATAHPIWTRFDKLGGNLHQYTFLFNEFGEGRHAIRFQKLLTVEDGVAKEVDDVTVPISMSAQLDDLLPRDPHELVALYFQDYGAEQHLAGEFGGAKIQYRRDQLNHLHARRGARDVYLNLSVRVQSQSEARGERRPPYAAVFRLVGDNHRAFVHFDKLSDYLAEHPDDGKLGSEGLLSGLRVMSVDLGLRTSASISVFRVARKDELKPNSEGRVPFCFPIEGNENLVAVHERSQLLKLPGETESKDLRAIREERQRTLRQLRTQLAYLRLLVRCGSEDVGRRERSWAKLIEQPMDANQMTPDWREAFEDELQKLKSLYGICGDREWTEAVYESVRRVWRHMGKQVRDWRKDVRSGERPKIRGYQKDVVGGNSIEQIEYLERQYKFLKSWSFFGKVSGQVIRAEKGSRFAITLREHIDHAKEDRLKKLADRIIMEALGYVYALDDERGKGKWVAKYPPCQLILLEELSEYQFNNDRPPSENNQLMQWSHRGVFQELLNQAQVHDLLVGTMYAAFSSRFDARTGAPGIRCRRVPARCAREQNPEPFPWWLNKFVAEHKLDGCPLRADDLIPTGEGEFFVSPFSAEEGDFHQIHADLNAAQNLQRRLWSDFDISQIRLRCDWGEVDGEPVLIPRTTGKRTADSYGNKVFYTKTGVTYYERERGKKRRKVFAQEELSEEEAELLVEADEAREKSVVLMRDPSGIINRGDWTRQKEFWSMVNQRIEGYLVKQIRSRVRLQESACENTGDI

SEQ ID NO: 255 - protein, 1140 aa, Bacillus hisashii
  REGION 1..1140: note = MISC_FEATURE - BhCas12b polypeptide sequence
MAPKKKRKVGIHGVPAAATRSFILKIEPNEEVKKGLWKTHEVLNHGIAYYMNILKLIRQEAIYEHHEQDPKNPKKVSKAEIQAELWDFVLKMQKCNSFTHEVDKDEVFNILRELYEELVPSSVEKKGEANQLSNKFLYPLVDPNSQSGKGTASSGRKPRWYNLKIAGDPSWEEEKKKWEEDKKKDPLAKILGKLAEYGLIPLFIPYTDSNEPIVKEIKWMEKSRNQSVRRLDKDMFIQALERFLSWESWNLKVKEEYEKVEKEYKTLEERIKEDIQALKALEQYEKERQEQLLRDTLNTNEYRLSKRGLRGWREIIQKWLKMDENEPSEKYLEVFKDYQRKHPREAGDYSVYEFLSKKENHFIWRNHPEYPYLYATFCEIDKKKKDAKQQATFTLADPINHPLWVRFEERSGSNLNKYRILTEQLHTEKLKKKLTVQLDRLIYPTESGGWEEKGKVDIVLLPSRQFYNQIFLDIEEKGKHAFTYKDESIKFPLKGTLGGARVQFDRDHLRRYPHKVESGNVGRIYFNMTVNIEPTESPVSKSLKIHRDDFPKVVNFKPKELTEWIKDSKGKKLKSGIESLEIGLRVMSIDLGQRQAAAASIFEVVDQKPDIEGKLFFPIKGTELYAVHRASFNIKLPGETLVKSREVLRKAREDNLKLMNQKLNFLRNVLHFQQFEDITEREKRVTKWISRQENSDVPLVYQDELIQIRELMYKPYKDWVAFLKQLHKRLEVEIGKEVKHWRKSLSDGRKGLYGISLKNIDEIDRTRKFLLRWSLRPTEPGEVRRLEPGQRFAIDQLNHLNALKEDRLKKMANTIIMHALGYCYDVRKKKWQAKNPACQIILFEDLSNYNPYEERSRFENSKLMKWSRREIPRQVALQGEIYGLQVGEVGAQFSSRFHAKTGSPGIRCSVVTKEKLQDNRFFKNLQREGRLTLDKIAVLKEGDLYPDKGGEKFISLSKDRKCVTTHADINAAQNLQKRFWTRTHGFYKVYCKAYQVDGQTVYIPESKDQKQKIIEEFGEGYFILKDGVYEWVNAGKLKIKKGSSKQSSSELVDSDILKDSFDLASELKGEKLMLYRDPSGNVFPSDKWMAAGVFFGKLERILISKLTNQYSISTIEDDSSKQSMKRPAATKKAGQAKKKK

SEQ ID NO: 256 - protein, 1108 aa, Bacillus thermoamylovorans
  REGION 1..1108: note = MISC_FEATURE - BTCas12b polypeptide sequence
MATRSFILKIEPNEEVKKGLWKTHEVLNHGIAYYMNILKLIRQEAIYEHHEQDPKNPKKVSKAEIQAELWDFVLKMQKCNSFTHEVDKDVVFNILRELYEELVPSSVEKKGEANQLSNKFLYPLVDPNSQSGKGTASSGRKPRWYNLKIAGDPSWEEEKKKWEEDKKKDPLAKILGKLAEYGLIPLFIPFTDSNEPIVKEIKWMEKSRNQSVRRLDKDMFIQALERFLSWESWNLKVKEEYEKVEKEHKTLEERIKEDIQAFKSLEQYEKERQEQLLRDTLNTNEYRLSKRGLRGWREIIQKWLKMDENEPSEKYLEVFKDYQRKHPREAGDYSVYEFLSKKENHFIWRNHPEYPYLYATFCEIDKKKKDAKQQATFTLADPINHPLWVRFEERSGSNLNKYRILTEQLHTEKLKKKLTVQLDRLIYPTESGGWEEKGKVDIVLLPSRQFYNQIFLDIEEKGKHAFTYKDESIKFPLKGTLGGARVQFDRDHLRRYPHKVESGNVGRIYFNMTVNIEPTESPVSKSLKIHRDDFPKFVNFKPKELTEWIKDSKGKKLKSGIESLEIGLRVMSIDLGQRQAAAASIFEVVDQKPDIEGKLFFPIKGTELYAVHRASFNIKLPGETLVKSREVLRKAREDNLKLMNQKLNFLRNVLHFQQFEDITEREKRVTKWISRQENSDVPLVYQDELIQIRELMYKPYKDWVAFLKQLHKRLEVEIGKEVKHWRKSLSDGRKGLYGISLKNIDEIDRTRKFLLRWSLRPTEPGEVRRLEPGQRFAIDQLNHLNALKEDRLKKMANTIIMHALGYCYDVRKKKWQAKNPACQIILFEDLSNYNPYEERSRFENSKLMKWSRREIPRQVALQGEIYGLQVGEVGAQFSSRFHAKTGSPGIRCSVVTKEKLQDNRFFKNLQREGRLTLDKIAVLKEGDLYPDKGGEKFISLSKDRKLVTTHADINAAQNLQKRFWTRTHGFYKVYCKAYQVDGQTVYIPESKDQKQKIIEEFGEGYFILKDGVYEWGNAGKLKIKKGSSKQSSSELVDSDILKDSFDLASELKGEKLMLYRDPSGNVFPSDKWMAAGVFFGKLERILISKLTNQYSISTIEDDSSKQSM

SEQ ID NO: 257 - protein, 1112 aa, Bacillus sp.
  REGION 1..1112: note = MISC_FEATURE - BvCas12b (Bacillus sp. V3-13) polypeptide sequence
MAIRSIKLKMKTNSGTDSIYLRKALWRTHQLINEGIAYYMNLLTLYRQEAIGDKTKEAYQAELINIIRNQQRNNGSSEEHGSDQEILALLRQLYELIIPSSIGESGDANQLGNKFLYPLVDPNSQSGKGTSNAGRKPRWKRLKEEGNPDWELEKKKDEERKAKDPTVKIFDNLNKYGLLPLFPLFTNIQKDIEWLPLGKRQSVRKWDKDMFIQAIERLLSWESWNRRVADEYKQLKEKTESYYKEHLTGGEEWIEKIRKFEKERNMELEKNAFAPNDGYFITSRQIRGWDRVYEKWSKLPESASPEELWKVVAEQQNKMSEGFGDPKVFSFLANRENRDIWRGHSERIYHIAAYNGLQKKLSRTKEQATFTLPDAIEHPLWIRYESPGGTNLNLFKLEEKQKKNYYVTLSKIIWPSEEKWIEKENIEIPLAPSIQFNRQIKLKQHVKGKQEISFSDYSSRISLDGVLGGSRIQFNRKYIKNHKELLGEGDIGPVFFNLVVDVAPLQETRNGRLQSPIGKALKVISSDFSKVIDYKPKELMDWMNTGSASNSFGVASLLEGMRVMSIDMGQRTSASVSIFEVVKELPKDQEQKLFYSINDTELFAIHKRSFLLNLPGEVVTKNNKQQRQERRKKRQFVRSQIRMLANVLRLETKKTPDERKKAIHKLMEIVQSYDSWTASQKEVWEKELNLLTNMAAFNDEIWKESLVELHHRIEPYVGQIVSKWRKGLSEGRKNLAGISMWNIDELEDTRRLLISWSKRSRTPGEANRIETDEPFGSSLLQHIQNVKDDRLKQMANLIIMTALGFKYDKEEKDRYKRWKETYPACQIILFENLNRYLFNLDRSRRENSRLMKWAHRSIPRTVSMQGEMFGLQVGDVRSEYSSRFHAKTGAPGIRCHALTEEDLKAGSNTLKRLIEDGFINESELAYLKKGDIIPSQGGELFVTLSKRYKKDSDNNELTVIHADINAAQNLQKRFWQQNSEVYRVPCQLARMGEDKLYIPKSQTETIKKYFGKGSFVKNNTEQEVYKWEKSEKMKIKTDTTFDLQDLDGFEDISKTIELAQEQQKKYLTMFRDPSGYFFNNETWRPQKEYWSIVNNIIKSCLKKKILSNKVEL

SEQ ID NO: 258 - DNA, 47 bp, synthetic construct
  misc_feature 1..47: note = 5'UTR oligonucleotide sequence
  source 1..47: mol_type = other DNA
gggaaataagagagaaaagaagagtaagaagaaatataagagccacc

SEQ ID NO: 259 - DNA, 101 bp, synthetic construct
  misc_feature 1..101: note = 3'UTR (TriLink standard UTR)polynucleotide sequence
  source 1..101: mol_type = other DNA
gctggagcctcggtggccatgcttcttgccccttgggcctccccccagcccctcctccccttcctgcacccgtacccccgtggtctttgaataaagtctga

SEQ ID NO: 260 - DNA, 3420 bp, Bacillus hisashii
  misc_feature 1..3420: note = bhCas12b (V4) polynucleotide sequence
  source 1..3420: mol_type = genomic DNA
atggccccaaagaagaagcggaaggtcggtatccacggagtcccagcagccgccaccagatccttcatcctgaagatcgagcccaacgaggaagtgaagaaaggcctctggaaaacccacgaggtgctgaaccacggaatcgcctactacatgaatatcctgaagctgatccggcaagaggccatctacgagcaccacgagcaggaccccaagaatcccaagaaggtgtccaaggccgagatccaggccgagctgtgggatttcgtgctgaagatgcagaagtgcaacagcttcacacacgaggtggacaaggacgaggtgttcaacatcctgagagagctgtacgaggaactggtgcccagcagcgtggaaaagaagggcgaagccaaccagctgagcaacaagtttctgtaccctctggtggaccccaacagccagtctggaaagggaacagccagcagcggcagaaagcccagatggtacaacctgaagattgccggcgatccctcctgggaagaagagaagaagaagtgggaagaagataagaaaaaggacccgctggccaagatcctgggcaagctggctgagtacggactgatccctctgttcatcccctacaccgacagcaacgagcccatcgtgaaagaaatcaagtggatggaaaagtcccggaaccagagcgtgcggcggctggataaggacatgttcattcaggccctggaacggttcctgagctgggagagctggaacctgaaagtgaaagaggaatacgagaaggtcgagaaagagtacaagaccctggaagagaggatcaaagaggacatccaggctctgaaggctctggaacagtatgagaaagagcggcaagaacagctgctgcgggacaccctgaacaccaacgagtaccggctgagcaagagaggccttagaggctggcgggaaatcatccagaaatggctgaaaatggacgagaacgagccctccgagaagtacctggaagtgttcaaggactaccagcggaagcaccctagagaggccggcgattacagcgtgtacgagttcctgtccaagaaagagaaccacttcatctggcggaatcaccctgagtacccctacctgtacgccaccttctgcgagatcgacaagaaaaagaaggacgccaagcagcaggccaccttcacactggccgatcctatcaatcaccctctgtgggtccgattcgaggaaagaagcggcagcaacctgaacaagtacagaatcctgaccgagcagctgcacaccgagaagctgaagaaaaagctgacagtgcagctggaccggctgatctaccctacagaatctggcggctgggaagagaagggcaaagtggacattgtgctgctgcccagccggcagttctacaaccagatcttcctggacatcgaggaaaagggcaagcacgccttcacctacaaggatgagagcatcaagttccctctgaagggcacactcggcggagccagagtgcagttcgacagagatcacctgagaagataccctcacaaggtggaaagcggcaacgtgggcagaatctacttcaacatgaccgtgaacatcgagcctacagagtccccagtgtccaagtctctgaagatccaccgggacgacttccccaaggtggtcaacttcaagcccaaagaactgaccgagtggatcaaggacagcaagggcaagaaactgaagtccggcatcgagtccctggaaatcggcctgagagtgatgagcatcgacctgggacagagacaggccgctgccgcctctattttcgaggtggtggatcagaagcccgacatcgaaggcaagctgtttttcccaatcaagggcaccgagctgtatgccgtgcacagagccagcttcaacatcaagctgcccggcgagacactggtcaagagcagagaagtgctgcggaaggccagagaggacaatctgaaactgatgaaccagaagctcaacttcctgcggaacgtgctgcacttccagcagttcgaggacatcaccgagagagagaagcgggtcaccaagtggatcagcagacaagagaacagcgacgtgcccctggtgtaccaggatgagctgatccagatccgcgagctgatgtacaagccttacaaggactgggtcgccttcctgaagcagctccacaagagactggaagtcgagatcggcaaagaagtgaagcactggcggaagtccctgagcgacggaagaaagggcctgtacggcatctccctgaagaacatcgacgagatcgatcggacccggaagttcctgctgagatggtccctgaggcctaccgaacctggcgaagtgcgtagactggaacccggccagagattcgccatcgaccagctgaatcacctgaacgccctgaaagaagatcggctgaagaagatggccaacaccatcatcatgcacgccctgggctactgctacgacgtgcggaagaagaaatggcaggctaagaaccccgcctgccagatcatcctgttcgaggatctgagcaactacaacccctacgaggaaaggtcccgcttcgagaacagcaagctcatgaagtggtccagacgcgagatccccagacaggttgcactgcagggcgagatctatggcctgcaagtgggagaagtgggcgctcagttcagcagcagattccacgccaagacaggcagccctggcatcagatgtagcgtcgtgaccaaagagaagctgcaggacaatcggttcttcaagaatctgcagagagagggcagactgaccctggacaaaatcgccgtgctgaaagagggcgatctgtacccagacaaaggcggcgagaagttcatcagcctgagcaaggatcggaagtgcgtgaccacacacgccgacatcaacgccgctcagaacctgcagaagcggttctggacaagaacccacggcttctacaaggtgtactgcaaggcctaccaggtggacggccagaccgtgtacatccctgagagcaaggaccagaagcagaagatcatcgaagagttcggcgagggctacttcattctgaaggacggggtgtacgaatgggtcaacgccggcaagctgaaaatcaagaagggcagctccaagcagagcagcagcgagctggtggatagcgacatcctgaaagacagcttcgacctggcctccgagctgaaaggcgaaaagctgatgctgtacagggaccccagcggcaatgtgttccccagcgacaaatggatggccgctggcgtgttcttcggaaagctggaacgcatcctgatcagcaagctgaccaaccagtactccatcagcaccatcgaggacgacagcagcaagcagtctatgaaaaggccggcggccacgaaaaaggccggccaggcaaaaaagaaaaag

SEQ ID NO: 261 - protein, 17 aa, synthetic construct
  REGION 1..17: note = synthetic peptide sequence
MAPKKKRKVGIHGVPAA

SEQ ID NO: 262 - DNA, 51 bp, synthetic construct
  misc_feature 1..51: note = synthetic oligonucleotide sequence
  source 1..51: mol_type = other DNA
atggccccaaagaagaagcggaaggtcggtatccacggagtcccagcagcc

SEQ ID NO: 263 - protein, 1554 aa, synthetic construct
  REGION 1..1554: note = 101 Cas9 TadAins 1015 polypeptide sequence
MDKKYSIGLAIGTNSVGWAVITDEYKVPSKKFKVLGNTDRHSIKKNLIGALLFDSGETAEATRLKRTARRRYTRRKNRICYLQEIFSNEMAKVDDSFFHRLEESFLVEEDKKHERHPIFGNIVDEVAYHEKYPTIYHLRKKLVDSTDKADLRLIYLALAHMIKFRGHFLIEGDLNPDNSDVDKLFIQLVQTYNQLFEENPINASGVDAKAILSARLSKSRRLENLIAQLPGEKKNGLFGNLIALSLGLTPNFKSNFDLAEDAKLQLSKDTYDDDLDNLLAQIGDQYADLFLAAKNLSDAILLSDILRVNTEITKAPLSASMIKRYDEHHQDLTLLKALVRQQLPEKYKEIFFDQSKNGYAGYIDGGASQEEFYKFIKPILEKMDGTEELLVKLNREDLLRKQRTFDNGSIPHQIHLGELHAILRRQEDFYPFLKDNREKIEKILTFRIPYYVGPLARGNSRFAWMTRKSEETITPWNFEEVVDKGASAQSFIERMTNFDKNLPNEKVLPKHSLLYEYFTVYNELTKVKYVTEGMRKPAFLSGEQKKAIVDLLFKTNRKVTVKQLKEDYFKKIECFDSVEISGVEDRFNASLGTYHDLLKIIKDKDFLDNEENEDILEDIVLTLTLFEDREMIEERLKTYAHLFDDKVMKQLKRRRYTGWGRLSRKLINGIRDKQSGKTILDFLKSDGFANRNFMQLIHDDSLTFKEDIQKAQVSGQGDSLHEHIANLAGSPAIKKGILQTVKVVDELVKVMGRHKPENIVIEMARENQTTQKGQKNSRERMKRIEEGIKELGSQILKEHPVENTQLQNEKLYLYYLQNGRDMYVDQELDINRLSDYDVDHIVPQSFLKDDSIDNKVLTRSDKNRGKSDNVPSEEVVKKMKNYWRQLLNAKLITQRKFDNLTKAERGGLSELDKAGFIKRQLVETRQITKHVAQILDSRMNTKYDENDKLIREVKVITLKSKLVSDFRKDFQFYKVREINNYHHAHDAYLNAVVGTALIKKYPKLESEFVYGDYKVGSSGSETPGTSESATPESSGSEVEFSHEYWMRHALTLAKRARDEREVPVGAVLVLNNRVIGEGWNRAIGLHDPTAHAEIMALRQGGLVMQNYRLIDATLYVTFEPCVMCAGAMIHSRIGRVVFGVRNAKTGAAGSLMDVLHYPGMNHRVEITEGILADECAALLCYFFRMPRQVFNAQKKAQSSTDYDVRKMIAKSEQEIGKATAKYFFYSNIMNFFKTEITLANGEIRKRPLIETNGETGEIVWDKGRDFATVRKVLSMPQVNIVKKTEVQTGGFSKESILPKRNSDKLIARKKDWDPKKYGGFDSPTVAYSVLVVAKVEKGKSKKLKSVKELLGITIMERSSFEKNPIDFLEAKGYKEVKKDLIIKLPKYSLFELENGRKRMLASAGELQKGNELALPSKYVNFLYLASHYEKLKGSPEDNEQKQLFVEQHKHYLDEIIEQISEFSKRVILADANLDKVLSAYNKHRDKPIREQAENIIHLFTLTNLGAPAAFKYFDTTIDRKRYTSTKEVLDATLIHQSITGLYETRIDLSQLGGD

SEQ ID NO: 264 - protein, 1554 aa, synthetic construct
  REGION 1..1554: note = 102 Cas9 TadAins 1022 polypeptide sequence
MDKKYSIGLAIGTNSVGWAVITDEYKVPSKKFKVLGNTDRHSIKKNLIGALLFDSGETAEATRLKRTARRRYTRRKNRICYLQEIFSNEMAKVDDSFFHRLEESFLVEEDKKHERHPIFGNIVDEVAYHEKYPTIYHLRKKLVDSTDKADLRLIYLALAHMIKFRGHFLIEGDLNPDNSDVDKLFIQLVQTYNQLFEENPINASGVDAKAILSARLSKSRRLENLIAQLPGEKKNGLFGNLIALSLGLTPNFKSNFDLAEDAKLQLSKDTYDDDLDNLLAQIGDQYADLFLAAKNLSDAILLSDILRVNTEITKAPLSASMIKRYDEHHQDLTLLKALVRQQLPEKYKEIFFDQSKNGYAGYIDGGASQEEFYKFIKPILEKMDGTEELLVKLNREDLLRKQRTFDNGSIPHQIHLGELHAILRRQEDFYPFLKDNREKIEKILTFRIPYYVGPLARGNSRFAWMTRKSEETITPWNFEEVVDKGASAQSFIERMTNFDKNLPNEKVLPKHSLLYEYFTVYNELTKVKYVTEGMRKPAFLSGEQKKAIVDLLFKTNRKVTVKQLKEDYFKKIECFDSVEISGVEDRFNASLGTYHDLLKIIKDKDFLDNEENEDILEDIVLTLTLFEDREMIEERLKTYAHLFDDKVMKQLKRRRYTGWGRLSRKLINGIRDKQSGKTILDFLKSDGFANRNFMQLIHDDSLTFKEDIQKAQVSGQGDSLHEHIANLAGSPAIKKGILQTVKVVDELVKVMGRHKPENIVIEMARENQTTQKGQKNSRERMKRIEEGIKELGSQILKEHPVENTQLQNEKLYLYYLQNGRDMYVDQELDINRLSDYDVDHIVPQSFLKDDSIDNKVLTRSDKNRGKSDNVPSEEVVKKMKNYWRQLLNAKLITQRKFDNLTKAERGGLSELDKAGFIKRQLVETRQITKHVAQILDSRMNTKYDENDKLIREVKVITLKSKLVSDFRKDFQFYKVREINNYHHAHDAYLNAVVGTALIKKYPKLESEFVYGDYKVYDVRKMIGSSGSETPGTSESATPESSGSEVEFSHEYWMRHALTLAKRARDEREVPVGAVLVLNNRVIGEGWNRAIGLHDPTAHAEIMALRQGGLVMQNYRLIDATLYVTFEPCVMCAGAMIHSRIGRVVFGVRNAKTGAAGSLMDVLHYPGMNHRVEITEGILADECAALLCYFFRMPRQVFNAQKKAQSSTDAKSEQEIGKATAKYFFYSNIMNFFKTEITLANGEIRKRPLIETNGETGEIVWDKGRDFATVRKVLSMPQVNIVKKTEVQTGGFSKESILPKRNSDKLIARKKDWDPKKYGGFDSPTVAYSVLVVAKVEKGKSKKLKSVKELLGITIMERSSFEKNPIDFLEAKGYKEVKKDLIIKLPKYSLFELENGRKRMLASAGELQKGNELALPSKYVNFLYLASHYEKLKGSPEDNEQKQLFVEQHKHYLDEIIEQISEFSKRVILADANLDKVLSAYNKHRDKPIREQAENIIHLFTLTNLGAPAAFKYFDTTIDRKRYTSTKEVLDATLIHQSITGLYETRIDLSQLGGD

SEQ ID NO: 265 - protein, 1554 aa, synthetic construct
  REGION 1..1554: note = 103 Cas9 TadAins 1029 polypeptide sequence
MDKKYSIGLAIGTNSVGWAVITDEYKVPSKKFKVLGNTDRHSIKKNLIGALLFDSGETAEATRLKRTARRRYTRRKNRICYLQEIFSNEMAKVDDSFFHRLEESFLVEEDKKHERHPIFGNIVDEVAYHEKYPTIYHLRKKLVDSTDKADLRLIYLALAHMIKFRGHFLIEGDLNPDNSDVDKLFIQLVQTYNQLFEENPINASGVDAKAILSARLSKSRRLENLIAQLPGEKKNGLFGNLIALSLGLTPNFKSNFDLAEDAKLQLSKDTYDDDLDNLLAQIGDQYADLFLAAKNLSDAILLSDILRVNTEITKAPLSASMIKRYDEHHQDLTLLKALVRQQLPEKYKEIFFDQSKNGYAGYIDGGASQEEFYKFIKPILEKMDGTEELLVKLNREDLLRKQRTFDNGSIPHQIHLGELHAILRRQEDFYPFLKDNREKIEKILTFRIPYYVGPLARGNSRFAWMTRKSEETITPWNFEEVVDKGASAQSFIERMTNFDKNLPNEKVLPKHSLLYEYFTVYNELTKVKYVTEGMRKPAFLSGEQKKAIVDLLFKTNRKVTVKQLKEDYFKKIECFDSVEISGVEDRFNASLGTYHDLLKIIKDKDFLDNEENEDILEDIVLTLTLFEDREMIEERLKTYAHLFDDKVMKQLKRRRYTGWGRLSRKLINGIRDKQSGKTILDFLKSDGFANRNFMQLIHDDSLTFKEDIQKAQVSGQGDSLHEHIANLAGSPAIKKGILQTVKVVDELVKVMGRHKPENIVIEMARENQTTQKGQKNSRERMKRIEEGIKELGSQILKEHPVENTQLQNEKLYLYYLQNGRDMYVDQELDINRLSDYDVDHIVPQSFLKDDSIDNKVLTRSDKNRGKSDNVPSEEVVKKMKNYWRQLLNAKLITQRKFDNLTKAERGGLSELDKAGFIKRQLVETRQITKHVAQILDSRMNTKYDENDKLIREVKVITLKSKLVSDFRKDFQFYKVREINNYHHAHDAYLNAVVGTALIKKYPKLESEFVYGDYKVYDVRKMIAKSEQEIGSSGSETPGTSESATPESSGSEVEFSHEYWMRHALTLAKRARDEREVPVGAVLVLNNRVIGEGWNRAIGLHDPTAHAEIMALRQGGLVMQNYRLIDATLYVTFEPCVMCAGAMIHSRIGRVVFGVRNAKTGAAGSLMDVLHYPGMNHRVEITEGILADECAALLCYFFRMPRQVFNAQKKAQSSTDGKATAKYFFYSNIMNFFKTEITLANGEIRKRPLIETNGETGEIVWDKGRDFATVRKVLSMPQVNIVKKTEVQTGGFSKESILPKRNSDKLIARKKDWDPKKYGGFDSPTVAYSVLVVAKVEKGKSKKLKSVKELLGITIMERSSFEKNPIDFLEAKGYKEVKKDLIIKLPKYSLFELENGRKRMLASAGELQKGNELALPSKYVNFLYLASHYEKLKGSPEDNEQKQLFVEQHKHYLDEIIEQISEFSKRVILADANLDKVLSAYNKHRDKPIREQAENIIHLFTLTNLGAPAAFKYFDTTIDRKRYTSTKEVLDATLIHQSITGLYETRIDLSQLGGD

SEQ ID NO: 266 - protein, 1554 aa, synthetic construct
  REGION 1..1554: note = 103 Cas9 TadAins 1040 polypeptide sequence
MDKKYSIGLAIGTNSVGWAVITDEYKVPSKKFKVLGNTDRHSIKKNLIGALLFDSGETAEATRLKRTARRRYTRRKNRICYLQEIFSNEMAKVDDSFFHRLEESFLVEEDKKHERHPIFGNIVDEVAYHEKYPTIYHLRKKLVDSTDKADLRLIYLALAHMIKFRGHFLIEGDLNPDNSDVDKLFIQLVQTYNQLFEENPINASGVDAKAILSARLSKSRRLENLIAQLPGEKKNGLFGNLIALSLGLTPNFKSNFDLAEDAKLQLSKDTYDDDLDNLLAQIGDQYADLFLAAKNLSDAILLSDILRVNTEITKAPLSASMIKRYDEHHQDLTLLKALVRQQLPEKYKEIFFDQSKNGYAGYIDGGASQEEFYKFIKPILEKMDGTEELLVKLNREDLLRKQRTFDNGSIPHQIHLGELHAILRRQEDFYPFLKDNREKIEKILTFRIPYYVGPLARGNSRFAWMTRKSEETITPWNFEEVVDKGASAQSFIERMTNFDKNLPNEKVLPKHSLLYEYFTVYNELTKVKYVTEGMRKPAFLSGEQKKAIVDLLFKTNRKVTVKQLKEDYFKKIECFDSVEISGVEDRFNASLGTYHDLLKIIKDKDFLDNEENEDILEDIVLTLTLFEDREMIEERLKTYAHLFDDKVMKQLKRRRYTGWGRLSRKLINGIRDKQSGKTILDFLKSDGFANRNFMQLIHDDSLTFKEDIQKAQVSGQGDSLHEHIANLAGSPAIKKGILQTVKVVDELVKVMGRHKPENIVIEMARENQTTQKGQKNSRERMKRIEEGIKELGSQILKEHPVENTQLQNEKLYLYYLQNGRDMYVDQELDINRLSDYDVDHIVPQSFLKDDSIDNKVLTRSDKNRGKSDNVPSEEVVKKMKNYWRQLLNAKLITQRKFDNLTKAERGGLSELDKAGFIKRQLVETRQITKHVAQILDSRMNTKYDENDKLIREVKVITLKSKLVSDFRKDFQFYKVREINNYHHAHDAYLNAVVGTALIKKYPKLESEFVYGDYKVYDVRKMIAKSEQEIGKATAKYFFYSGSSGSETPGTSESATPESSGSEVEFSHEYWMRHALTLAKRARDEREVPVGAVLVLNNRVIGEGWNRAIGLHDPTAHAEIMALRQGGLVMQNYRLIDATLYVTFEPCVMCAGAMIHSRIGRVVFGVRNAKTGAAGSLMDVLHYPGMNHRVEITEGILADECAALLCYFFRMPRQVFNAQKKAQSSTDNIMNFFKTEITLANGEIRKRPLIETNGETGEIVWDKGRDFATVRKVLSMPQVNIVKKTEVQTGGFSKESILPKRNSDKLIARKKDWDPKKYGGFDSPTVAYSVLVVAKVEKGKSKKLKSVKELLGITIMERSSFEKNPIDFLEAKGYKEVKKDLIIKLPKYSLFELENGRKRMLASAGELQKGNELALPSKYVNFLYLASHYEKLKGSPEDNEQKQLFVEQHKHYLDEIIEQISEFSKRVILADANLDKVLSAYNKHRDKPIREQAENIIHLFTLTNLGAPAAFKYFDTTIDRKRYTSTKEVLDATLIHQSITGLYETRIDLSQLGGD

SEQ ID NO: 267 - protein, 1554 aa, synthetic construct
  REGION 1..1554: note = 105 Cas9 TadAins 1068 polypeptide sequence
MDKKYSIGLAIGTNSVGWAVITDEYKVPSKKFKVLGNTDRHSIKKNLIGALLFDSGETAEATRLKRTARRRYTRRKNRICYLQEIFSNEMAKVDDSFFHRLEESFLVEEDKKHERHPIFGNIVDEVAYHEKYPTIYHLRKKLVDSTDKADLRLIYLALAHMIKFRGHFLIEGDLNPDNSDVDKLFIQLVQTYNQLFEENPINASGVDAKAILSARLSKSRRLENLIAQLPGEKKNGLFGNLIALSLGLTPNFKSNFDLAEDAKLQLSKDTYDDDLDNLLAQIGDQYADLFLAAKNLSDAILLSDILRVNTEITKAPLSASMIKRYDEHHQDLTLLKALVRQQLPEKYKEIFFDQSKNGYAGYIDGGASQEEFYKFIKPILEKMDGTEELLVKLNREDLLRKQRTFDNGSIPHQIHLGELHAILRRQEDFYPFLKDNREKIEKILTFRIPYYVGPLARGNSRFAWMTRKSEETITPWNFEEVVDKGASAQSFIERMTNFDKNLPNEKVLPKHSLLYEYFTVYNELTKVKYVTEGMRKPAFLSGEQKKAIVDLLFKTNRKVTVKQLKEDYFKKIECFDSVEISGVEDRFNASLGTYHDLLKIIKDKDFLDNEENEDILEDIVLTLTLFEDREMIEERLKTYAHLFDDKVMKQLKRRRYTGWGRLSRKLINGIRDKQSGKTILDFLKSDGFANRNFMQLIHDDSLTFKEDIQKAQVSGQGDSLHEHIANLAGSPAIKKGILQTVKVVDELVKVMGRHKPENIVIEMARENQTTQKGQKNSRERMKRIEEGIKELGSQILKEHPVENTQLQNEKLYLYYLQNGRDMYVDQELDINRLSDYDVDHIVPQSFLKDDSIDNKVLTRSDKNRGKSDNVPSEEVVKKMKNYWRQLLNAKLITQRKFDNLTKAERGGLSELDKAGFIKRQLVETRQITKHVAQILDSRMNTKYDENDKLIREVKVITLKSKLVSDFRKDFQFYKVREINNYHHAHDAYLNAVVGTALIKKYPKLESEFVYGDYKVYDVRKMIAKSEQEIGKATAKYFFYSNIMNFFKTEITLANGEIRKRPLIETNGEGSSGSETPGTSESATPESSGSEVEFSHEYWMRHALTLAKRARDEREVPVGAVLVLNNRVIGEGWNRAIGLHDPTAHAEIMALRQGGLVMQNYRLIDATLYVTFEPCVMCAGAMIHSRIGRVVFGVRNAKTGAAGSLMDVLHYPGMNHRVEITEGILADECAALLCYFFRMPRQVFNAQKKAQSSTDTGEIVWDKGRDFATVRKVLSMPQVNIVKKTEVQTGGFSKESILPKRNSDKLIARKKDWDPKKYGGFDSPTVAYSVLVVAKVEKGKSKKLKSVKELLGITIMERSSFEKNPIDFLEAKGYKEVKKDLIIKLPKYSLFELENGRKRMLASAGELQKGNELALPSKYVNFLYLASHYEKLKGSPEDNEQKQLFVEQHKHYLDEIIEQISEFSKRVILADANLDKVLSAYNKHRDKPIREQAENIIHLFTLTNLGAPAAFKYFDTTIDRKRYTSTKEVLDATLIHQSITGLYETRIDLSQLGGD

SEQ ID NO: 268 - protein, 1554 aa, synthetic construct
  REGION 1..1554: note = 106 Cas9 TadAins 1247 polypeptide sequence
MDKKYSIGLAIGTNSVGWAVITDEYKVPSKKFKVLGNTDRHSIKKNLIGALLFDSGETAEATRLKRTARRRYTRRKNRICYLQEIFSNEMAKVDDSFFHRLEESFLVEEDKKHERHPIFGNIVDEVAYHEKYPTIYHLRKKLVDSTDKADLRLIYLALAHMIKFRGHFLIEGDLNPDNSDVDKLFIQLVQTYNQLFEENPINASGVDAKAILSARLSKSRRLENLIAQLPGEKKNGLFGNLIALSLGLTPNFKSNFDLAEDAKLQLSKDTYDDDLDNLLAQIGDQYADLFLAAKNLSDAILLSDILRVNTEITKAPLSASMIKRYDEHHQDLTLLKALVRQQLPEKYKEIFFDQSKNGYAGYIDGGASQEEFYKFIKPILEKMDGTEELLVKLNREDLLRKQRTFDNGSIPHQIHLGELHAILRRQEDFYPFLKDNREKIEKILTFRIPYYVGPLARGNSRFAWMTRKSEETITPWNFEEVVDKGASAQSFIERMTNFDKNLPNEKVLPKHSLLYEYFTVYNELTKVKYVTEGMRKPAFLSGEQKKAIVDLLFKTNRKVTVKQLKEDYFKKIECFDSVEISGVEDRFNASLGTYHDLLKIIKDKDFLDNEENEDILEDIVLTLTLFEDREMIEERLKTYAHLFDDKVMKQLKRRRYTGWGRLSRKLINGIRDKQSGKTILDFLKSDGFANRNFMQLIHDDSLTFKEDIQKAQVSGQGDSLHEHIANLAGSPAIKKGILQTVKVVDELVKVMGRHKPENIVIEMARENQTTQKGQKNSRERMKRIEEGIKELGSQILKEHPVENTQLQNEKLYLYYLQNGRDMYVDQELDINRLSDYDVDHIVPQSFLKDDSIDNKVLTRSDKNRGKSDNVPSEEVVKKMKNYWRQLLNAKLITQRKFDNLTKAERGGLSELDKAGFIKRQLVETRQITKHVAQILDSRMNTKYDENDKLIREVKVITLKSKLVSDFRKDFQFYKVREINNYHHAHDAYLNAVVGTALIKKYPKLESEFVYGDYKVYDVRKMIAKSEQEIGKATAKYFFYSNIMNFFKTEITLANGEIRKRPLIETNGETGEIVWDKGRDFATVRKVLSMPQVNIVKKTEVQTGGFSKESILPKRNSDKLIARKKDWDPKKYGGFDSPTVAYSVLVVAKVEKGKSKKLKSVKELLGITIMERSSFEKNPIDFLEAKGYKEVKKDLIIKLPKYSLFELENGRKRMLASAGELQKGNELALPSKYVNFLYLASHYEKLKGGSSGSETPGTSESATPESSGSEVEFSHEYWMRHALTLAKRARDEREVPVGAVLVLNNRVIGEGWNRAIGLHDPTAHAEIMALRQGGLVMQNYRLIDATLYVTFEPCVMCAGAMIHSRIGRVVFGVRNAKTGAAGSLMDVLHYPGMNHRVEITEGILADECAALLCYFFRMPRQVFNAQKKAQSSTDSPEDNEQKQLFVEQHKHYLDEIIEQISEFSKRVILADANLDKVLSAYNKHRDKPIREQAENIIHLFTLTNLGAPAAFKYFDTTIDRKRYTSTKEVLDATLIHQSITGLYETRIDLSQLGGD

SEQ ID NO: 269 - protein, 1554 aa, synthetic construct
  REGION 1..1554: note = 107 Cas9 TadAins 1054 polypeptide sequence
MDKKYSIGLAIGTNSVGWAVITDEYKVPSKKFKVLGNTDRHSIKKNLIGALLFDSGETAEATRLKRTARRRYTRRKNRICYLQEIFSNEMAKVDDSFFHRLEESFLVEEDKKHERHPIFGNIVDEVAYHEKYPTIYHLRKKLVDSTDKADLRLIYLALAHMIKFRGHFLIEGDLNPDNSDVDKLFIQLVQTYNQLFEENPINASGVDAKAILSARLSKSRRLENLIAQLPGEKKNGLFGNLIALSLGLTPNFKSNFDLAEDAKLQLSKDTYDDDLDNLLAQIGDQYADLFLAAKNLSDAILLSDILRVNTEITKAPLSASMIKRYDEHHQDLTLLKALVRQQLPEKYKEIFFDQSKNGYAGYIDGGASQEEFYKFIKPILEKMDGTEELLVKLNREDLLRKQRTFDNGSIPHQIHLGELHAILRRQEDFYPFLKDNREKIEKILTFRIPYYVGPLARGNSRFAWMTRKSEETITPWNFEEVVDKGASAQSFIERMTNFDKNLPNEKVLPKHSLLYEYFTVYNELTKVKYVTEGMRKPAFLSGEQKKAIVDLLFKTNRKVTVKQLKEDYFKKIECFDSVEISGVEDRFNASLGTYHDLLKIIKDKDFLDNEENEDILEDIVLTLTLFEDREMIEERLKTYAHLFDDKVMKQLKRRRYTGWGRLSRKLINGIRDKQSGKTILDFLKSDGFANRNFMQLIHDDSLTFKEDIQKAQVSGQGDSLHEHIANLAGSPAIKKGILQTVKVVDELVKVMGRHKPENIVIEMARENQTTQKGQKNSRERMKRIEEGIKELGSQILKEHPVENTQLQNEKLYLYYLQNGRDMYVDQELDINRLSDYDVDHIVPQSFLKDDSIDNKVLTRSDKNRGKSDNVPSEEVVKKMKNYWRQLLNAKLITQRKFDNLTKAERGGLSELDKAGFIKRQLVETRQITKHVAQILDSRMNTKYDENDKLIREVKVITLKSKLVSDFRKDFQFYKVREINNYHHAHDAYLNAVVGTALIKKYPKLESEFVYGDYKVYDVRKMIAKSEQEIGKATAKYFFYSNIMNFFKTEITLANGSSGSETPGTSESATPESSGSEVEFSHEYWMRHALTLAKRARDEREVPVGAVLVLNNRVIGEGWNRAIGLHDPTAHAEIMALRQGGLVMQNYRLIDATLYVTFEPCVMCAGAMIHSRIGRVVFGVRNAKTGAAGSLMDVLHYPGMNHRVEITEGILADECAALLCYFFRMPRQVFNAQKKAQSSTDGEIRKRPLIETNGETGEIVWDKGRDFATVRKVLSMPQVNIVKKTEVQTGGFSKESILPKRNSDKLIARKKDWDPKKYGGFDSPTVAYSVLVVAKVEKGKSKKLKSVKELLGITIMERSSFEKNPIDFLEAKGYKEVKKDLIIKLPKYSLFELENGRKRMLASAGELQKGNELALPSKYVNFLYLASHYEKLKGSPEDNEQKQLFVEQHKHYLDEIIEQISEFSKRVILADANLDKVLSAYNKHRDKPIREQAENIIHLFTLTNLGAPAAFKYFDTTIDRKRYTSTKEVLDATLIHQSITGLYETRIDLSQLGGD

SEQ ID NO: 270 - protein, 1554 aa, synthetic construct
  REGION 1..1554: note = 108 Cas9 TadAins 1026 polypeptide sequence
MDKKYSIGLAIGTNSVGWAVITDEYKVPSKKFKVLGNTDRHSIKKNLIGALLFDSGETAEATRLKRTARRRYTRRKNRICYLQEIFSNEMAKVDDSFFHRLEESFLVEEDKKHERHPIFGNIVDEVAYHEKYPTIYHLRKKLVDSTDKADLRLIYLALAHMIKFRGHFLIEGDLNPDNSDVDKLFIQLVQTYNQLFEENPINASGVDAKAILSARLSKSRRLENLIAQLPGEKKNGLFGNLIALSLGLTPNFKSNFDLAEDAKLQLSKDTYDDDLDNLLAQIGDQYADLFLAAKNLSDAILLSDILRVNTEITKAPLSASMIKRYDEHHQDLTLLKALVRQQLPEKYKEIFFDQSKNGYAGYIDGGASQEEFYKFIKPILEKMDGTEELLVKLNREDLLRKQRTFDNGSIPHQIHLGELHAILRRQEDFYPFLKDNREKIEKILTFRIPYYVGPLARGNSRFAWMTRKSEETITPWNFEEVVDKGASAQSFIERMTNFDKNLPNEKVLPKHSLLYEYFTVYNELTKVKYVTEGMRKPAFLSGEQKKAIVDLLFKTNRKVTVKQLKEDYFKKIECFDSVEISGVEDRFNASLGTYHDLLKIIKDKDFLDNEENEDILEDIVLTLTLFEDREMIEERLKTYAHLFDDKVMKQLKRRRYTGWGRLSRKLINGIRDKQSGKTILDFLKSDGFANRNFMQLIHDDSLTFKEDIQKAQVSGQGDSLHEHIANLAGSPAIKKGILQTVKVVDELVKVMGRHKPENIVIEMARENQTTQKGQKNSRERMKRIEEGIKELGSQILKEHPVENTQLQNEKLYLYYLQNGRDMYVDQELDINRLSDYDVDHIVPQSFLKDDSIDNKVLTRSDKNRGKSDNVPSEEVVKKMKNYWRQLLNAKLITQRKFDNLTKAERGGLSELDKAGFIKRQLVETRQITKHVAQILDSRMNTKYDENDKLIREVKVITLKSKLVSDFRKDFQFYKVREINNYHHAHDAYLNAVVGTALIKKYPKLESEFVYGDYKVYDVRKMIAKSEGSSGSETPGTSESATPESSGSEVEFSHEYWMRHALTLAKRARDEREVPVGAVLVLNNRVIGEGWNRAIGLHDPTAHAEIMALRQGGLVMQNYRLIDATLYVTFEPCVMCAGAMIHSRIGRVVFGVRNAKTGAAGSLMDVLHYPGMNHRVEITEGILADECAALLCYFFRMPRQVFNAQKKAQSSTDQEIGKATAKYFFYSNIMNFFKTEITLANGEIRKRPLIETNGETGEIVWDKGRDFATVRKVLSMPQVNIVKKTEVQTGGFSKESILPKRNSDKLIARKKDWDPKKYGGFDSPTVAYSVLVVAKVEKGKSKKLKSVKELLGITIMERSSFEKNPIDFLEAKGYKEVKKDLIIKLPKYSLFELENGRKRMLASAGELQKGNELALPSKYVNFLYLASHYEKLKGSPEDNEQKQLFVEQHKHYLDEIIEQISEFSKRVILADANLDKVLSAYNKHRDKPIREQAENIIHLFTLTNLGAPAAFKYFDTTIDRKRYTSTKEVLDATLIHQSITGLYETRIDLSQLGGD

SEQ ID NO: 271 - protein, 1540 aa, synthetic construct
  REGION 1..1540: note = 109 Cas9 TadAins 768 polypeptide sequence
MDKKYSIGLAIGTNSVGWAVITDEYKVPSKKFKVLGNTDRHSIKKNLIGALLFDSGETAEATRLKRTARRRYTRRKNRICYLQEIFSNEMAKVDDSFFHRLEESFLVEEDKKHERHPIFGNIVDEVAYHEKYPTIYHLRKKLVDSTDKADLRLIYLALAHMIKFRGHFLIEGDLNPDNSDVDKLFIQLVQTYNQLFEENPINASGVDAKAILSARLSKSRRLENLIAQLPGEKKNGLFGNLIALSLGLTPNFKSNFDLAEDAKLQLSKDTYDDDLDNLLAQIGDQYADLFLAAKNLSDAILLSDILRVNTEITKAPLSASMIKRYDEHHQDLTLLKALVRQQLPEKYKEIFFDQSKNGYAGYIDGGASQEEFYKFIKPILEKMDGTEELLVKLNREDLLRKQRTFDNGSIPHQIHLGELHAILRRQEDFYPFLKDNREKIEKILTFRIPYYVGPLARGNSRFAWMTRKSEETITPWNFEEVVDKGASAQSFIERMTNFDKNLPNEKVLPKHSLLYEYFTVYNELTKVKYVTEGMRKPAFLSGEQKKAIVDLLFKTNRKVTVKQLKEDYFKKIECFDSVEISGVEDRFNASLGTYHDLLKIIKDKDFLDNEENEDILEDIVLTLTLFEDREMIEERLKTYAHLFDDKVMKQLKRRRYTGWGRLSRKLINGIRDKQSGKTILDFLKSDGFANRNFMQLIHDDSLTFKEDIQKAQVSGQGDSLHEHIANLAGSPAIKKGILQTVKVVDELVKVMGRHKPENIVIEMARENQGSSGSETPGTSESATPESSGSEVEFSHEYWMRHALTLAKRARDEREVPVGAVLVLNNRVIGEGWNRAIGLHDPTAHAEIMALRQGGLVMQNYRLIDATLYVTFEPCVMCAGAMIHSRIGRVVFGVRNAKTGAAGSLMDVLHYPGMNHRVEITEGILADECAALLCYFFRMPRTTQKGQKNSRERMKRIEEGIKELGSQILKEHPVENTQLQNEKLYLYYLQNGRDMYVDQELDINRLSDYDVDHIVPQSFLKDDSIDNKVLTRSDKNRGKSDNVPSEEVVKKMKNYWRQLLNAKLITQRKFDNLTKAERGGLSELDKAGFIKRQLVETRQITKHVAQILDSRMNTKYDENDKLIREVKVITLKSKLVSDFRKDFQFYKVREINNYHHAHDAYLNAVVGTALIKKYPKLESEFVYGDYKVYDVRKMIAKSEQEIGKATAKYFFYSNIMNFFKTEITLANGEIRKRPLIETNGETGEIVWDKGRDFATVRKVLSMPQVNIVKKTEVQTGGFSKESILPKRNSDKLIARKKDWDPKKYGGFDSPTVAYSVLVVAKVEKGKSKKLKSVKELLGITIMERSSFEKNPIDFLEAKGYKEVKKDLIIKLPKYSLFELENGRKRMLASAGELQKGNELALPSKYVNFLYLASHYEKLKGSPEDNEQKQLFVEQHKHYLDEIIEQISEFSKRVILADANLDKVLSAYNKHRDKPIREQAENIIHLFTLTNLGAPAAFKYFDTTIDRKRYTSTKEVLDATLIHQSITGLYETRIDLSQLGGD

SEQ ID NO: 272 - protein, 1540 aa, synthetic construct
  REGION 1..1540: note = 110.1 Cas9 TadAins 1250 polypeptide sequence
MDKKYSIGLAIGTNSVGWAVITDEYKVPSKKFKVLGNTDRHSIKKNLIGALLFDSGETAEATRLKRTARRRYTRRKNRICYLQEIFSNEMAKVDDSFFHRLEESFLVEEDKKHERHPIFGNIVDEVAYHEKYPTIYHLRKKLVDSTDKADLRLIYLALAHMIKFRGHFLIEGDLNPDNSDVDKLFIQLVQTYNQLFEENPINASGVDAKAILSARLSKSRRLENLIAQLPGEKKNGLFGNLIALSLGLTPNFKSNFDLAEDAKLQLSKDTYDDDLDNLLAQIGDQYADLFLAAKNLSDAILLSDILRVNTEITKAPLSASMIKRYDEHHQDLTLLKALVRQQLPEKYKEIFFDQSKNGYAGYIDGGASQEEFYKFIKPILEKMDGTEELLVKLNREDLLRKQRTFDNGSIPHQIHLGELHAILRRQEDFYPFLKDNREKIEKILTFRIPYYVGPLARGNSRFAWMTRKSEETITPWNFEEVVDKGASAQSFIERMTNFDKNLPNEKVLPKHSLLYEYFTVYNELTKVKYVTEGMRKPAFLSGEQKKAIVDLLFKTNRKVTVKQLKEDYFKKIECFDSVEISGVEDRFNASLGTYHDLLKIIKDKDFLDNEENEDILEDIVLTLTLFEDREMIEERLKTYAHLFDDKVMKQLKRRRYTGWGRLSRKLINGIRDKQSGKTILDFLKSDGFANRNFMQLIHDDSLTFKEDIQKAQVSGQGDSLHEHIANLAGSPAIKKGILQTVKVVDELVKVMGRHKPENIVIEMARENQTTQKGQKNSRERMKRIEEGIKELGSQILKEHPVENTQLQNEKLYLYYLQNGRDMYVDQELDINRLSDYDVDHIVPQSFLKDDSIDNKVLTRSDKNRGKSDNVPSEEVVKKMKNYWRQLLNAKLITQRKFDNLTKAERGGLSELDKAGFIKRQLVETRQITKHVAQILDSRMNTKYDENDKLIREVKVITLKSKLVSDFRKDFQFYKVREINNYHHAHDAYLNAVVGTALIKKYPKLESEFVYGDYKVYDVRKMIAKSEQEIGKATAKYFFYSNIMNFFKTEITLANGEIRKRPLIETNGETGEIVWDKGRDFATVRKVLSMPQVNIVKKTEVQTGGFSKESILPKRNSDKLIARKKDWDPKKYGGFDSPTVAYSVLVVAKVEKGKSKKLKSVKELLGITIMERSSFEKNPIDFLEAKGYKEVKKDLIIKLPKYSLFELENGRKRMLASAGELQKGNELALPSKYVNFLYLASHYEKLKGSPGSSGSETPGTSESATPESSGSEVEFSHEYWMRHALTLAKRARDEREVPVGAVLVLNNRVIGEGWNRAIGLHDPTAHAEIMALRQGGLVMQNYRLIDATLYVTFEPCVMCAGAMIHSRIGRVVFGVRNAKTGAAGSLMDVLHYPGMNHRVEITEGILADECAALLCYFFRMPREDNEQKQLFVEQHKHYLDEIIEQISEFSKRVILADANLDKVLSAYNKHRDKPIREQAENIIHLFTLTNLGAPAAFKYFDTTIDRKRYTSTKEVLDATLIHQSITGLYETRIDLSQLGGD

SEQ ID NO: 273 - protein, 1543 aa, synthetic construct
  REGION 1..1543: note = 110.2 Cas9 TadAins 1250 polypeptide sequence
MDKKYSIGLAIGTNSVGWAVITDEYKVPSKKFKVLGNTDRHSIKKNLIGALLFDSGETAEATRLKRTARRRYTRRKNRICYLQEIFSNEMAKVDDSFFHRLEESFLVEEDKKHERHPIFGNIVDEVAYHEKYPTIYHLRKKLVDSTDKADLRLIYLALAHMIKFRGHFLIEGDLNPDNSDVDKLFIQLVQTYNQLFEENPINASGVDAKAILSARLSKSRRLENLIAQLPGEKKNGLFGNLIALSLGLTPNFKSNFDLAEDAKLQLSKDTYDDDLDNLLAQIGDQYADLFLAAKNLSDAILLSDILRVNTEITKAPLSASMIKRYDEHHQDLTLLKALVRQQLPEKYKEIFFDQSKNGYAGYIDGGASQEEFYKFIKPILEKMDGTEELLVKLNREDLLRKQRTFDNGSIPHQIHLGELHAILRRQEDFYPFLKDNREKIEKILTFRIPYYVGPLARGNSRFAWMTRKSEETITPWNFEEVVDKGASAQSFIERMTNFDKNLPNEKVLPKHSLLYEYFTVYNELTKVKYVTEGMRKPAFLSGEQKKAIVDLLFKTNRKVTVKQLKEDYFKKIECFDSVEISGVEDRFNASLGTYHDLLKIIKDKDFLDNEENEDILEDIVLTLTLFEDREMIEERLKTYAHLFDDKVMKQLKRRRYTGWGRLSRKLINGIRDKQSGKTILDFLKSDGFANRNFMQLIHDDSLTFKEDIQKAQVSGQGDSLHEHIANLAGSPAIKKGILQTVKVVDELVKVMGRHKPENIVIEMARENQTTQKGQKNSRERMKRIEEGIKELGSQILKEHPVENTQLQNEKLYLYYLQNGRDMYVDQELDINRLSDYDVDHIVPQSFLKDDSIDNKVLTRSDKNRGKSDNVPSEEVVKKMKNYWRQLLNAKLITQRKFDNLTKAERGGLSELDKAGFIKRQLVETRQITKHVAQILDSRMNTKYDENDKLIREVKVITLKSKLVSDFRKDFQFYKVREINNYHHAHDAYLNAVVGTALIKKYPKLESEFVYGDYKVYDVRKMIAKSEQEIGKATAKYFFYSNIMNFFKTEITLANGEIRKRPLIETNGETGEIVWDKGRDFATVRKVLSMPQVNIVKKTEVQTGGFSKESILPKRNSDKLIARKKDWDPKKYGGFDSPTVAYSVLVVAKVEKGKSKKLKSVKELLGITIMERSSFEKNPIDFLEAKGYKEVKKDLIIKLPKYSLFELENGRKRMLASAGELQKGNELALPSKYVNFLYLASHYEKLKGSPGSSGSSGSETPGTSESATPESSGSEVEFSHEYWMRHALTLAKRARDEREVPVGAVLVLNNRVIGEGWNRAIGLHDPTAHAEIMALRQGGLVMQNYRLIDATLYVTFEPCVMCAGAMIHSRIGRVVFGVRNAKTGAAGSLMDVLHYPGMNHRVEITEGILADECAALLCYFFRMPREDNEQKQLFVEQHKHYLDEIIEQISEFSKRVILADANLDKVLSAYNKHRDKPIREQAENIIHLFTLTNLGAPAAFKYFDTTIDRKRYTSTKEVLDATLIHQSITGLYETRIDLSQLGGD

SEQ ID NO: 274 - protein, 1546 aa, synthetic construct
  REGION 1..1546: note = 110.3 Cas9 TadAins 1250 polypeptide sequence
MDKKYSIGLAIGTNSVGWAVITDEYKVPSKKFKVLGNTDRHSIKKNLIGALLFDSGETAEATRLKRTARRRYTRRKNRICYLQEIFSNEMAKVDDSFFHRLEESFLVEEDKKHERHPIFGNIVDEVAYHEKYPTIYHLRKKLVDSTDKADLRLIYLALAHMIKFRGHFLIEGDLNPDNSDVDKLFIQLVQTYNQLFEENPINASGVDAKAILSARLSKSRRLENLIAQLPGEKKNGLFGNLIALSLGLTPNFKSNFDLAEDAKLQLSKDTYDDDLDNLLAQIGDQYADLFLAAKNLSDAILLSDILRVNTEITKAPLSASMIKRYDEHHQDLTLLKALVRQQLPEKYKEIFFDQSKNGYAGYIDGGASQEEFYKFIKPILEKMDGTEELLVKLNREDLLRKQRTFDNGSIPHQIHLGELHAILRRQEDFYPFLKDNREKIEKILTFRIPYYVGPLARGNSRFAWMTRKSEETITPWNFEEVVDKGASAQSFIERMTNFDKNLPNEKVLPKHSLLYEYFTVYNELTKVKYVTEGMRKPAFLSGEQKKAIVDLLFKTNRKVTVKQLKEDYFKKIECFDSVEISGVEDRFNASLGTYHDLLKIIKDKDFLDNEENEDILEDIVLTLTLFEDREMIEERLKTYAHLFDDKVMKQLKRRRYTGWGRLSRKLINGIRDKQSGKTILDFLKSDGFANRNFMQLIHDDSLTFKEDIQKAQVSGQGDSLHEHIANLAGSPAIKKGILQTVKVVDELVKVMGRHKPENIVIEMARENQTTQKGQKNSRERMKRIEEGIKELGSQILKEHPVENTQLQNEKLYLYYLQNGRDMYVDQELDINRLSDYDVDHIVPQSFLKDDSIDNKVLTRSDKNRGKSDNVPSEEVVKKMKNYWRQLLNAKLITQRKFDNLTKAERGGLSELDKAGFIKRQLVETRQITKHVAQILDSRMNTKYDENDKLIREVKVITLKSKLVSDFRKDFQFYKVREINNYHHAHDAYLNAVVGTALIKKYPKLESEFVYGDYKVYDVRKMIAKSEQEIGKATAKYFFYSNIMNFFKTEITLANGEIRKRPLIETNGETGEIVWDKGRDFATVRKVLSMPQVNIVKKTEVQTGGFSKESILPKRNSDKLIARKKDWDPKKYGGFDSPTVAYSVLVVAKVEKGKSKKLKSVKELLGITIMERSSFEKNPIDFLEAKGYKEVKKDLIIKLPKYSLFELENGRKRMLASAGELQKGNELALPSKYVNFLYLASHYEKLKGSPGSSGSSGSETPGTSESATPESGSSSGSEVEFSHEYWMRHALTLAKRARDEREVPVGAVLVLNNRVIGEGWNRAIGLHDPTAHAEIMALRQGGLVMQNYRLIDATLYVTFEPCVMCAGAMIHSRIGRVVFGVRNAKTGAAGSLMDVLHYPGMNHRVEITEGILADECAALLCYFFRMPREDNEQKQLFVEQHKHYLDEIIEQISEFSKRVILADANLDKVLSAYNKHRDKPIREQAENIIHLFTLTNLGAPAAFKYFDTTIDRKRYTSTKEVLDATLIHQSITGLYETRIDLSQLGGD

SEQ ID NO: 275 - protein, 1546 aa, synthetic construct
  REGION 1..1546: note = 110.4 Cas9 TadAins 1250 polypeptide sequence
MDKKYSIGLAIGTNSVGWAVITDEYKVPSKKFKVLGNTDRHSIKKNLIGALLFDSGETAEATRLKRTARRRYTRRKNRICYLQEIFSNEMAKVDDSFFHRLEESFLVEEDKKHERHPIFGNIVDEVAYHEKYPTIYHLRKKLVDSTDKADLRLIYLALAHMIKFRGHFLIEGDLNPDNSDVDKLFIQLVQTYNQLFEENPINASGVDAKAILSARLSKSRRLENLIAQLPGEKKNGLFGNLIALSLGLTPNFKSNFDLAEDAKLQLSKDTYDDDLDNLLAQIGDQYADLFLAAKNLSDAILLSDILRVNTEITKAPLSASMIKRYDEHHQDLTLLKALVRQQLPEKYKEIFFDQSKNGYAGYIDGGASQEEFYKFIKPILEKMDGTEELLVKLNREDLLRKQRTFDNGSIPHQIHLGELHAILRRQEDFYPFLKDNREKIEKILTFRIPYYVGPLARGNSRFAWMTRKSEETITPWNFEEVVDKGASAQSFIERMTNFDKNLPNEKVLPKHSLLYEYFTVYNELTKVKYVTEGMRKPAFLSGEQKKAIVDLLFKTNRKVTVKQLKEDYFKKIECFDSVEISGVEDRFNASLGTYHDLLKIIKDKDFLDNEENEDILEDIVLTLTLFEDREMIEERLKTYAHLFDDKVMKQLKRRRYTGWGRLSRKLINGIRDKQSGKTILDFLKSDGFANRNFMQLIHDDSLTFKEDIQKAQVSGQGDSLHEHIANLAGSPAIKKGILQTVKVVDELVKVMGRHKPENIVIEMARENQTTQKGQKNSRERMKRIEEGIKELGSQILKEHPVENTQLQNEKLYLYYLQNGRDMYVDQELDINRLSDYDVDHIVPQSFLKDDSIDNKVLTRSDKNRGKSDNVPSEEVVKKMKNYWRQLLNAKLITQRKFDNLTKAERGGLSELDKAGFIKRQLVETRQITKHVAQILDSRMNTKYDENDKLIREVKVITLKSKLVSDFRKDFQFYKVREINNYHHAHDAYLNAVVGTALIKKYPKLESEFVYGDYKVYDVRKMIAKSEQEIGKATAKYFFYSNIMNFFKTEITLANGEIRKRPLIETNGETGEIVWDKGRDFATVRKVLSMPQVNIVKKTEVQTGGFSKESILPKRNSDKLIARKKDWDPKKYGGFDSPTVAYSVLVVAKVEKGKSKKLKSVKELLGITIMERSSFEKNPIDFLEAKGYKEVKKDLIIKLPKYSLFELENGRKRMLASAGELQKGNELALPSKYVNFLYLASHYEKLKGSPGSSGSSGSETPGTSESATPESGSSSGSEVEFSHEYWMRHALTLAKRARDEREVPVGAVLVLNNRVIGEGWNRAIGLHDPTAHAEIMALRQGGLVMQNYRLIDATLYVTFEPCVMCAGAMIHSRIGRVVFGVRNAKTGAAGSLMDVLHYPGMNHRVEITEGILADECAALLCYFFRMRREDNEQKQLFVEQHKHYLDEIIEQISEFSKRVILADANLDKVLSAYNKHRDKPIREQAENIIHLFTLTNLGAPAAFKYFDTTIDRKRYTSTKEVLDATLIHQSITGLYETRIDLSQLGGD

SEQ ID NO: 276 - protein, 1546 aa, synthetic construct
  REGION 1..1546: note = 110.5 Cas9 TadAins 1249 polypeptide sequence
MDKKYSIGLAIGTNSVGWAVITDEYKVPSKKFKVLGNTDRHSIKKNLIGALLFDSGETAEATRLKRTARRRYTRRKNRICYLQEIFSNEMAKVDDSFFHRLEESFLVEEDKKHERHPIFGNIVDEVAYHEKYPTIYHLRKKLVDSTDKADLRLIYLALAHMIKFRGHFLIEGDLNPDNSDVDKLFIQLVQTYNQLFEENPINASGVDAKAILSARLSKSRRLENLIAQLPGEKKNGLFGNLIALSLGLTPNFKSNFDLAEDAKLQLSKDTYDDDLDNLLAQIGDQYADLFLAAKNLSDAILLSDILRVNTEITKAPLSASMIKRYDEHHQDLTLLKALVRQQLPEKYKEIFFDQSKNGYAGYIDGGASQEEFYKFIKPILEKMDGTEELLVKLNREDLLRKQRTFDNGSIPHQIHLGELHAILRRQEDFYPFLKDNREKIEKILTFRIPYYVGPLARGNSRFAWMTRKSEETITPWNFEEVVDKGASAQSFIERMTNFDKNLPNEKVLPKHSLLYEYFTVYNELTKVKYVTEGMRKPAFLSGEQKKAIVDLLFKTNRKVTVKQLKEDYFKKIECFDSVEISGVEDRFNASLGTYHDLLKIIKDKDFLDNEENEDILEDIVLTLTLFEDREMIEERLKTYAHLFDDKVMKQLKRRRYTGWGRLSRKLINGIRDKQSGKTILDFLKSDGFANRNFMQLIHDDSLTFKEDIQKAQVSGQGDSLHEHIANLAGSPAIKKGILQTVKVVDELVKVMGRHKPENIVIEMARENQTTQKGQKNSRERMKRIEEGIKELGSQILKEHPVENTQLQNEKLYLYYLQNGRDMYVDQELDINRLSDYDVDHIVPQSFLKDDSIDNKVLTRSDKNRGKSDNVPSEEVVKKMKNYWRQLLNAKLITQRKFDNLTKAERGGLSELDKAGFIKRQLVETRQITKHVAQILDSRMNTKYDENDKLIREVKVITLKSKLVSDFRKDFQFYKVREINNYHHAHDAYLNAVVGTALIKKYPKLESEFVYGDYKVYDVRKMIAKSEQEIGKATAKYFFYSNIMNFFKTEITLANGEIRKRPLIETNGETGEIVWDKGRDFATVRKVLSMPQVNIVKKTEVQTGGFSKESILPKRNSDKLIARKKDWDPKKYGGFDSPTVAYSVLVVAKVEKGKSKKLKSVKELLGITIMERSSFEKNPIDFLEAKGYKEVKKDLIIKLPKYSLFELENGRKRMLASAGELQKGNELALPSKYVNFLYLASHYEKLKGSGSSGSSGSETPGTSESATPESGSSSGSEVEFSHEYWMRHALTLAKRARDEREVPVGAVLVLNNRVIGEGWNRAIGLHDPTAHAEIMALRQGGLVMQNYRLIDATLYVTFEPCVMCAGAMIHSRIGRVVFGVRNAKTGAAGSLMDVLHYPGMNHRVEITEGILADECAALLCYFFRMRRPEDNEQKQLFVEQHKHYLDEIIEQISEFSKRVILADANLDKVLSAYNKHRDKPIREQAENIIHLFTLTNLGAPAAFKYFDTTIDRKRYTSTKEVLDATLIHQSITGLYETRIDLSQLGGD

SEQ ID NO: 277 - protein, 1551 aa, synthetic construct
  REGION 1..1551: note = 110.5 Cas9 TadAins delta59-66 1250 polypeptide sequence
MDKKYSIGLAIGTNSVGWAVITDEYKVPSKKFKVLGNTDRHSIKKNLIGALLFDSGETAEATRLKRTARRRYTRRKNRICYLQEIFSNEMAKVDDSFFHRLEESFLVEEDKKHERHPIFGNIVDEVAYHEKYPTIYHLRKKLVDSTDKADLRLIYLALAHMIKFRGHFLIEGDLNPDNSDVDKLFIQLVQTYNQLFEENPINASGVDAKAILSARLSKSRRLENLIAQLPGEKKNGLFGNLIALSLGLTPNFKSNFDLAEDAKLQLSKDTYDDDLDNLLAQIGDQYADLFLAAKNLSDAILLSDILRVNTEITKAPLSASMIKRYDEHHQDLTLLKALVRQQLPEKYKEIFFDQSKNGYAGYIDGGASQEEFYKFIKPILEKMDGTEELLVKLNREDLLRKQRTFDNGSIPHQIHLGELHAILRRQEDFYPFLKDNREKIEKILTFRIPYYVGPLARGNSRFAWMTRKSEETITPWNFEEVVDKGASAQSFIERMTNFDKNLPNEKVLPKHSLLYEYFTVYNELTKVKYVTEGMRKPAFLSGEQKKAIVDLLFKTNRKVTVKQLKEDYFKKIECFDSVEISGVEDRFNASLGTYHDLLKIIKDKDFLDNEENEDILEDIVLTLTLFEDREMIEERLKTYAHLFDDKVMKQLKRRRYTGWGRLSRKLINGIRDKQSGKTILDFLKSDGFANRNFMQLIHDDSLTFKEDIQKAQVSGQGDSLHEHIANLAGSPAIKKGILQTVKVVDELVKVMGRHKPENIVIEMARENQTTQKGQKNSRERMKRIEEGIKELGSQILKEHPVENTQLQNEKLYLYYLQNGRDMYVDQELDINRLSDYDVDHIVPQSFLKDDSIDNKVLTRSDKNRGKSDNVPSEEVVKKMKNYWRQLLNAKLITQRKFDNLTKAERGGLSELDKAGFIKRQLVETRQITKHVAQILDSRMNTKYDENDKLIREVKVITLKSKLVSDFRKDFQFYKVREINNYHHAHDAYLNAVVGTALIKKYPKLESEFVYGDYKVYDVRKMIAKSEQEIGKATAKYFFYSNIMNFFKTEITLANGEIRKRPLIETNGETGEIVWDKGRDFATVRKVLSMPQVNIVKKTEVQTGGFSKESILPKRNSDKLIARKKDWDPKKYGGFDSPTVAYSVLVVAKVEKGKSKKLKSVKELLGITIMERSSFEKNPIDFLEAKGYKEVKKDLIIKLPKYSLFELENGRKRMLASAGELQKGNELALPSKYVNFLYLASHYEKLKGSPGSSGSSGSETPGTSESATPESGSSGSEVEFSHEYWMRHALTLAKRARDEREVPVGAVLVLNNRVIGEGWNRAHAEIMALRQGGLVMQNYRLIDATLYVTFEPCVMCAGAMIHSRIGRVVFGVRNAKTGAAGSLMDVLHYPGMNHRVEITEGILADECAALLCYFFRMPRQVFNAQKKAQSSTDEDNEQKQLFVEQHKHYLDEIIEQISEFSKRVILADANLDKVLSAYNKHRDKPIREQAENIIHLFTLTNLGAPAAFKYFDTTIDRKRYTSTKEVLDATLIHQSITGLYETRIDLSQLGGD

SEQ ID NO: 278 - protein, 1546 aa, synthetic construct
  REGION 1..1546: note = 110.6 Cas9 TadAins 1251 polypeptide sequence
MDKKYSIGLAIGTNSVGWAVITDEYKVPSKKFKVLGNTDRHSIKKNLIGALLFDSGETAEATRLKRTARRRYTRRKNRICYLQEIFSNEMAKVDDSFFHRLEESFLVEEDKKHERHPIFGNIVDEVAYHEKYPTIYHLRKKLVDSTDKADLRLIYLALAHMIKFRGHFLIEGDLNPDNSDVDKLFIQLVQTYNQLFEENPINASGVDAKAILSARLSKSRRLENLIAQLPGEKKNGLFGNLIALSLGLTPNFKSNFDLAEDAKLQLSKDTYDDDLDNLLAQIGDQYADLFLAAKNLSDAILLSDILRVNTEITKAPLSASMIKRYDEHHQDLTLLKALVRQQLPEKYKEIFFDQSKNGYAGYIDGGASQEEFYKFIKPILEKMDGTEELLVKLNREDLLRKQRTFDNGSIPHQIHLGELHAILRRQEDFYPFLKDNREKIEKILTFRIPYYVGPLARGNSRFAWMTRKSEETITPWNFEEVVDKGASAQSFIERMTNFDKNLPNEKVLPKHSLLYEYFTVYNELTKVKYVTEGMRKPAFLSGEQKKAIVDLLFKTNRKVTVKQLKEDYFKKIECFDSVEISGVEDRFNASLGTYHDLLKIIKDKDFLDNEENEDILEDIVLTLTLFEDREMIEERLKTYAHLFDDKVMKQLKRRRYTGWGRLSRKLINGIRDKQSGKTILDFLKSDGFANRNFMQLIHDDSLTFKEDIQKAQVSGQGDSLHEHIANLAGSPAIKKGILQTVKVVDELVKVMGRHKPENIVIEMARENQTTQKGQKNSRERMKRIEEGIKELGSQILKEHPVENTQLQNEKLYLYYLQNGRDMYVDQELDINRLSDYDVDHIVPQSFLKDDSIDNKVLTRSDKNRGKSDNVPSEEVVKKMKNYWRQLLNAKLITQRKFDNLTKAERGGLSELDKAGFIKRQLVETRQITKHVAQILDSRMNTKYDENDKLIREVKVITLKSKLVSDFRKDFQFYKVREINNYHHAHDAYLNAVVGTALIKKYPKLESEFVYGDYKVYDVRKMIAKSEQEIGKATAKYFFYSNIMNFFKTEITLANGEIRKRPLIETNGETGEIVWDKGRDFATVRKVLSMPQVNIVKKTEVQTGGFSKESILPKRNSDKLIARKKDWDPKKYGGFDSPTVAYSVLVVAKVEKGKSKKLKSVKELLGITIMERSSFEKNPIDFLEAKGYKEVKKDLIIKLPKYSLFELENGRKRMLASAGELQKGNELALPSKYVNFLYLASHYEKLKGSPEGSSGSSGSETPGTSESATPESGSSSGSEVEFSHEYWMRHALTLAKRARDEREVPVGAVLVLNNRVIGEGWNRAIGLHDPTAHAEIMALRQGGLVMQNYRLIDATLYVTFEPCVMCAGAMIHSRIGRVVFGVRNAKTGAAGSLMDVLHYPGMNHRVEITEGILADECAALLCYFFRMRRDNEQKQLFVEQHKHYLDEIIEQISEFSKRVILADANLDKVLSAYNKHRDKPIREQAENIIHLFTLTNLGAPAAFKYFDTTIDRKRYTSTKEVLDATLIHQSITGLYETRIDLSQLGGD

SEQ ID NO: 279 - protein, 1546 aa, synthetic construct
  REGION 1..1546: note = 110.7 Cas9 TadAins 1252 polypeptide sequence
MDKKYSIGLAIGTNSVGWAVITDEYKVPSKKFKVLGNTDRHSIKKNLIGALLFDSGETAEATRLKRTARRRYTRRKNRICYLQEIFSNEMAKVDDSFFHRLEESFLVEEDKKHERHPIFGNIVDEVAYHEKYPTIYHLRKKLVDSTDKADLRLIYLALAHMIKFRGHFLIEGDLNPDNSDVDKLFIQLVQTYNQLFEENPINASGVDAKAILSARLSKSRRLENLIAQLPGEKKNGLFGNLIALSLGLTPNFKSNFDLAEDAKLQLSKDTYDDDLDNLLAQIGDQYADLFLAAKNLSDAILLSDILRVNTEITKAPLSASMIKRYDEHHQDLTLLKALVRQQLPEKYKEIFFDQSKNGYAGYIDGGASQEEFYKFIKPILEKMDGTEELLVKLNREDLLRKQRTFDNGSIPHQIHLGELHAILRRQEDFYPFLKDNREKIEKILTFRIPYYVGPLARGNSRFAWMTRKSEETITPWNFEEVVDKGASAQSFIERMTNFDKNLPNEKVLPKHSLLYEYFTVYNELTKVKYVTEGMRKPAFLSGEQKKAIVDLLFKTNRKVTVKQLKEDYFKKIECFDSVEISGVEDRFNASLGTYHDLLKIIKDKDFLDNEENEDILEDIVLTLTLFEDREMIEERLKTYAHLFDDKVMKQLKRRRYTGWGRLSRKLINGIRDKQSGKTILDFLKSDGFANRNFMQLIHDDSLTFKEDIQKAQVSGQGDSLHEHIANLAGSPAIKKGILQTVKVVDELVKVMGRHKPENIVIEMARENQTTQKGQKNSRERMKRIEEGIKELGSQILKEHPVENTQLQNEKLYLYYLQNGRDMYVDQELDINRLSDYDVDHIVPQSFLKDDSIDNKVLTRSDKNRGKSDNVPSEEVVKKMKNYWRQLLNAKLITQRKFDNLTKAERGGLSELDKAGFIKRQLVETRQITKHVAQILDSRMNTKYDENDKLIREVKVITLKSKLVSDFRKDFQFYKVREINNYHHAHDAYLNAVVGTALIKKYPKLESEFVYGDYKVYDVRKMIAKSEQEIGKATAKYFFYSNIMNFFKTEITLANGEIRKRPLIETNGETGEIVWDKGRDFATVRKVLSMPQVNIVKKTEVQTGGFSKESILPKRNSDKLIARKKDWDPKKYGGFDSPTVAYSVLVVAKVEKGKSKKLKSVKELLGITIMERSSFEKNPIDFLEAKGYKEVKKDLIIKLPKYSLFELENGRKRMLASAGELQKGNELALPSKYVNFLYLASHYEKLKGSPEDGSSGSSGSETPGTSESATPESGSSSGSEVEFSHEYWMRHALTLAKRARDEREVPVGAVLVLNNRVIGEGWNRAIGLHDPTAHAEIMALRQGGLVMQNYRLIDATLYVTFEPCVMCAGAMIHSRIGRVVFGVRNAKTGAAGSLMDVLHYPGMNHRVEITEGILADECAALLCYFFRMRRNEQKQLFVEQHKHYLDEIIEQISEFSKRVILADANLDKVLSAYNKHRDKPIREQAENIIHLFTLTNLGAPAAFKYFDTTIDRKRYTSTKEVLDATLIHQSITGLYETRIDLSQLGGD

SEQ ID NO: 280 - protein, 1533 aa, synthetic construct
  REGION 1..1533: note = 110.8 Cas9 TadAins delta59-66 C-truncate 1250 polypeptide sequence
MDKKYSIGLAIGTNSVGWAVITDEYKVPSKKFKVLGNTDRHSIKKNLIGALLFDSGETAEATRLKRTARRRYTRRKNRICYLQEIFSNEMAKVDDSFFHRLEESFLVEEDKKHERHPIFGNIVDEVAYHEKYPTIYHLRKKLVDSTDKADLRLIYLALAHMIKFRGHFLIEGDLNPDNSDVDKLFIQLVQTYNQLFEENPINASGVDAKAILSARLSKSRRLENLIAQLPGEKKNGLFGNLIALSLGLTPNFKSNFDLAEDAKLQLSKDTYDDDLDNLLAQIGDQYADLFLAAKNLSDAILLSDILRVNTEITKAPLSASMIKRYDEHHQDLTLLKALVRQQLPEKYKEIFFDQSKNGYAGYIDGGASQEEFYKFIKPILEKMDGTEELLVKLNREDLLRKQRTFDNGSIPHQIHLGELHAILRRQEDFYPFLKDNREKIEKILTFRIPYYVGPLARGNSRFAWMTRKSEETITPWNFEEVVDKGASAQSFIERMTNFDKNLPNEKVLPKHSLLYEYFTVYNELTKVKYVTEGMRKPAFLSGEQKKAIVDLLFKTNRKVTVKQLKEDYFKKIECFDSVEISGVEDRFNASLGTYHDLLKIIKDKDFLDNEENEDILEDIVLTLTLFEDREMIEERLKTYAHLFDDKVMKQLKRRRYTGWGRLSRKLINGIRDKQSGKTILDFLKSDGFANRNFMQLIHDDSLTFKEDIQKAQVSGQGDSLHEHIANLAGSPAIKKGILQTVKVVDELVKVMGRHKPENIVIEMARENQTTQKGQKNSRERMKRIEEGIKELGSQILKEHPVENTQLQNEKLYLYYLQNGRDMYVDQELDINRLSDYDVDHIVPQSFLKDDSIDNKVLTRSDKNRGKSDNVPSEEVVKKMKNYWRQLLNAKLITQRKFDNLTKAERGGLSELDKAGFIKRQLVETRQITKHVAQILDSRMNTKYDENDKLIREVKVITLKSKLVSDFRKDFQFYKVREINNYHHAHDAYLNAVVGTALIKKYPKLESEFVYGDYKVYDVRKMIAKSEQEIGKATAKYFFYSNIMNFFKTEITLANGEIRKRPLIETNGETGEIVWDKGRDFATVRKVLSMPQVNIVKKTEVQTGGFSKESILPKRNSDKLIARKKDWDPKKYGGFDSPTVAYSVLVVAKVEKGKSKKLKSVKELLGITIMERSSFEKNPIDFLEAKGYKEVKKDLIIKLPKYSLFELENGRKRMLASAGELQKGNELALPSKYVNFLYLASHYEKLKGSPGSSGSETPGTSESATPESSGSEVEFSHEYWMRHALTLAKRARDEREVPVGAVLVLNNRVIGEGWNRAHAEIMALRQGGLVMQNYRLIDATLYVTFEPCVMCAGAMIHSRIGRVVFGVRNAKTGAAGSLMDVLHYPGMNHRVEITEGILADECAALLCYFFRMPRQEDNEQKQLFVEQHKHYLDEIIEQISEFSKRVILADANLDKVLSAYNKHRDKPIREQAENIIHLFTLTNLGAPAAFKYFDTTIDRKRYTSTKEVLDATLIHQSITGLYETRIDLSQLGGD

SEQ ID NO: 281 - protein, 1549 aa, synthetic construct
  REGION 1..1549: note = 111.1 Cas9 TadAins 997 polypeptide sequence
MDKKYSIGLAIGTNSVGWAVITDEYKVPSKKFKVLGNTDRHSIKKNLIGALLFDSGETAEATRLKRTARRRYTRRKNRICYLQEIFSNEMAKVDDSFFHRLEESFLVEEDKKHERHPIFGNIVDEVAYHEKYPTIYHLRKKLVDSTDKADLRLIYLALAHMIKFRGHFLIEGDLNPDNSDVDKLFIQLVQTYNQLFEENPINASGVDAKAILSARLSKSRRLENLIAQLPGEKKNGLFGNLIALSLGLTPNFKSNFDLAEDAKLQLSKDTYDDDLDNLLAQIGDQYADLFLAAKNLSDAILLSDILRVNTEITKAPLSASMIKRYDEHHQDLTLLKALVRQQLPEKYKEIFFDQSKNGYAGYIDGGASQEEFYKFIKPILEKMDGTEELLVKLNREDLLRKQRTFDNGSIPHQIHLGELHAILRRQEDFYPFLKDNREKIEKILTFRIPYYVGPLARGNSRFAWMTRKSEETITPWNFEEVVDKGASAQSFIERMTNFDKNLPNEKVLPKHSLLYEYFTVYNELTKVKYVTEGMRKPAFLSGEQKKAIVDLLFKTNRKVTVKQLKEDYFKKIECFDSVEISGVEDRFNASLGTYHDLLKIIKDKDFLDNEENEDILEDIVLTLTLFEDREMIEERLKTYAHLFDDKVMKQLKRRRYTGWGRLSRKLINGIRDKQSGKTILDFLKSDGFANRNFMQLIHDDSLTFKEDIQKAQVSGQGDSLHEHIANLAGSPAIKKGILQTVKVVDELVKVMGRHKPENIVIEMARENQTTQKGQKNSRERMKRIEEGIKELGSQILKEHPVENTQLQNEKLYLYYLQNGRDMYVDQELDINRLSDYDVDHIVPQSFLKDDSIDNKVLTRSDKNRGKSDNVPSEEVVKKMKNYWRQLLNAKLITQRKFDNLTKAERGGLSELDKAGFIKRQLVETRQITKHVAQILDSRMNTKYDENDKLIREVKVITLKSKLVSDFRKDFQFYKVREINNYHHAHDAYLNAVVGTALSHEYWMRHALTLAKRARDEREVPVGAVLVLNNRVIGEGWNRAIGLHDPTAHAEIMALRQGGLVMQNYRLIDATLYVTFEPCVMCAGAMIHSRIGRVVFGVRNAKTGAAGSLMDVLHYPGMNHRVEITEGILADECAALLCYFFRMPRQVFNAQKKAQSSTDGSSGSETPGTSESATPESSGIKKYPKLESEFVYGDYKVYDVRKMIAKSEQEIGKATAKYFFYSNIMNFFKTEITLANGEIRKRPLIETNGETGEIVWDKGRDFATVRKVLSMPQVNIVKKTEVQTGGFSKESILPKRNSDKLIARKKDWDPKKYGGFDSPTVAYSVLVVAKVEKGKSKKLKSVKELLGITIMERSSFEKNPIDFLEAKGYKEVKKDLIIKLPKYSLFELENGRKRMLASAGELQKGNELALPSKYVNFLYLASHYEKLKGSPEDNEQKQLFVEQHKHYLDEIIEQISEFSKRVILADANLDKVLSAYNKHRDKPIREQAENIIHLFTLTNLGAPAAFKYFDTTIDRKRYTSTKEVLDATLIHQSITGLYETRIDLSQLGGD

SEQ ID NO: 282 - protein, 1555 aa, synthetic construct
  REGION 1..1555: note = 111.2 Cas9 TadAins 997 polypeptide sequence
MDKKYSIGLAIGTNSVGWAVITDEYKVPSKKFKVLGNTDRHSIKKNLIGALLFDSGETAEATRLKRTARRRYTRRKNRICYLQEIFSNEMAKVDDSFFHRLEESFLVEEDKKHERHPIFGNIVDEVAYHEKYPTIYHLRKKLVDSTDKADLRLIYLALAHMIKFRGHFLIEGDLNPDNSDVDKLFIQLVQTYNQLFEENPINASGVDAKAILSARLSKSRRLENLIAQLPGEKKNGLFGNLIALSLGLTPNFKSNFDLAEDAKLQLSKDTYDDDLDNLLAQIGDQYADLFLAAKNLSDAILLSDILRVNTEITKAPLSASMIKRYDEHHQDLTLLKALVRQQLPEKYKEIFFDQSKNGYAGYIDGGASQEEFYKFIKPILEKMDGTEELLVKLNREDLLRKQRTFDNGSIPHQIHLGELHAILRRQEDFYPFLKDNREKIEKILTFRIPYYVGPLARGNSRFAWMTRKSEETITPWNFEEVVDKGASAQSFIERMTNFDKNLPNEKVLPKHSLLYEYFTVYNELTKVKYVTEGMRKPAFLSGEQKKAIVDLLFKTNRKVTVKQLKEDYFKKIECFDSVEISGVEDRFNASLGTYHDLLKIIKDKDFLDNEENEDILEDIVLTLTLFEDREMIEERLKTYAHLFDDKVMKQLKRRRYTGWGRLSRKLINGIRDKQSGKTILDFLKSDGFANRNFMQLIHDDSLTFKEDIQKAQVSGQGDSLHEHIANLAGSPAIKKGILQTVKVVDELVKVMGRHKPENIVIEMARENQTTQKGQKNSRERMKRIEEGIKELGSQILKEHPVENTQLQNEKLYLYYLQNGRDMYVDQELDINRLSDYDVDHIVPQSFLKDDSIDNKVLTRSDKNRGKSDNVPSEEVVKKMKNYWRQLLNAKLITQRKFDNLTKAERGGLSELDKAGFIKRQLVETRQITKHVAQILDSRMNTKYDENDKLIREVKVITLKSKLVSDFRKDFQFYKVREINNYHHAHDAYLNAVVGTALSHEYWMRHALTLAKRARDEREVPVGAVLVLNNRVIGEGWNRAIGLHDPTAHAEIMALRQGGLVMQNYRLIDATLYVTFEPCVMCAGAMIHSRIGRVVFGVRNAKTGAAGSLMDVLHYPGMNHRVEITEGILADECAALLCYFFRMPRQVFNAQKKAQSSTDGSSGSSGSETPGTSESATPESSGGSSIKKYPKLESEFVYGDYKVYDVRKMIAKSEQEIGKATAKYFFYSNIMNFFKTEITLANGEIRKRPLIETNGETGEIVWDKGRDFATVRKVLSMPQVNIVKKTEVQTGGFSKESILPKRNSDKLIARKKDWDPKKYGGFDSPTVAYSVLVVAKVEKGKSKKLKSVKELLGITIMERSSFEKNPIDFLEAKGYKEVKKDLIIKLPKYSLFELENGRKRMLASAGELQKGNELALPSKYVNFLYLASHYEKLKGSPEDNEQKQLFVEQHKHYLDEIIEQISEFSKRVILADANLDKVLSAYNKHRDKPIREQAENIIHLFTLTNLGAPAAFKYFDTTIDRKRYTSTKEVLDATLIHQSITGLYETRIDLSQLGGD

SEQ ID NO: 283 - protein, 1421 aa, synthetic construct
  REGION 1..1421: note = 112 delta HNH TadA polypeptide sequence
MDKKYSIGLAIGTNSVGWAVITDEYKVPSKKFKVLGNTDRHSIKKNLIGALLFDSGETAEATRLKRTARRRYTRRKNRICYLQEIFSNEMAKVDDSFFHRLEESFLVEEDKKHERHPIFGNIVDEVAYHEKYPTIYHLRKKLVDSTDKADLRLIYLALAHMIKFRGHFLIEGDLNPDNSDVDKLFIQLVQTYNQLFEENPINASGVDAKAILSARLSKSRRLENLIAQLPGEKKNGLFGNLIALSLGLTPNFKSNFDLAEDAKLQLSKDTYDDDLDNLLAQIGDQYADLFLAAKNLSDAILLSDILRVNTEITKAPLSASMIKRYDEHHQDLTLLKALVRQQLPEKYKEIFFDQSKNGYAGYIDGGASQEEFYKFIKPILEKMDGTEELLVKLNREDLLRKQRTFDNGSIPHQIHLGELHAILRRQEDFYPFLKDNREKIEKILTFRIPYYVGPLARGNSRFAWMTRKSEETITPWNFEEVVDKGASAQSFIERMTNFDKNLPNEKVLPKHSLLYEYFTVYNELTKVKYVTEGMRKPAFLSGEQKKAIVDLLFKTNRKVTVKQLKEDYFKKIECFDSVEISGVEDRFNASLGTYHDLLKIIKDKDFLDNEENEDILEDIVLTLTLFEDREMIEERLKTYAHLFDDKVMKQLKRRRYTGWGRLSRKLINGIRDKQSGKTILDFLKSDGFANRNFMQLIHDDSLTFKEDIQKAQVSGQGDSLHEHIANLAGSPAIKKGILQTVKVVDELVKVMGRHKPENIVIEMARENQTTQKGQKNSRERMKRIEEGIKELGSEVEFSHEYWMRHALTLAKRARDEREVPVGAVLVLNNRVIGEGWNRAIGLHDPTAHAEIMALRQGGLVMQNYRLIDATLYVTFEPCVMCAGAMIHSRIGRVVFGVRNAKTGAAGSLMDVLHYPGMNHRVEITEGILADECAALLCYFFRMPRQVFNAQKKAQSSTDGGLSELDKAGFIKRQLVETRQITKHVAQILDSRMNTKYDENDKLIREVKVITLKSKLVSDFRKDFQFYKVREINNYHHAHDAYLNAVVGTALIKKYPKLESEFVYGDYKVYDVRKMIAKSEQEIGKATAKYFFYSNIMNFFKTEITLANGEIRKRPLIETNGETGEIVWDKGRDFATVRKVLSMPQVNIVKKTEVQTGGFSKESILPKRNSDKLIARKKDWDPKKYGGFDSPTVAYSVLVVAKVEKGKSKKLKSVKELLGITIMERSSFEKNPIDFLEAKGYKEVKKDLIIKLPKYSLFELENGRKRMLASAGELQKGNELALPSKYVNFLYLASHYEKLKGSPEDNEQKQLFVEQHKHYLDEIIEQISEFSKRVILADANLDKVLSAYNKHRDKPIREQAENIIHLFTLTNLGAPAAFKYFDTTIDRKRYTSTKEVLDATLIHQSITGLYETRIDLSQLGGD

SEQ ID NO: 284 - protein, 1552 aa, synthetic construct
  REGION 1..1552: note = 113 N-term single TadA helixtrunc 165-end polypeptide sequence
MSEVEFSHEYWMRHALTLAKRARDEREVPVGAVLVLNNRVIGEGWNRAIGLHDPTAHAEIMALRQGGLVMQNYRLIDATLYVTFEPCVMCAGAMIHSRIGRVVFGVRNAKTGAAGSLMDVLHYPGMNHRVEITEGILADECAALLCYFFRMPRSGGSSGGSSGSETPGTSESATPESSGGSSGGSDKKYSIGLAIGTNSVGWAVITDEYKVPSKKFKVLGNTDRHSIKKNLIGALLFDSGETAEATRLKRTARRRYTRRKNRICYLQEIFSNEMAKVDDSFFHRLEESFLVEEDKKHERHPIFGNIVDEVAYHEKYPTIYHLRKKLVDSTDKADLRLIYLALAHMIKFRGHFLIEGDLNPDNSDVDKLFIQLVQTYNQLFEENPINASGVDAKAILSARLSKSRRLENLIAQLPGEKKNGLFGNLIALSLGLTPNFKSNFDLAEDAKLQLSKDTYDDDLDNLLAQIGDQYADLFLAAKNLSDAILLSDILRVNTEITKAPLSASMIKRYDEHHQDLTLLKALVRQQLPEKYKEIFFDQSKNGYAGYIDGGASQEEFYKFIKPILEKMDGTEELLVKLNREDLLRKQRTFDNGSIPHQIHLGELHAILRRQEDFYPFLKDNREKIEKILTFRIPYYVGPLARGNSRFAWMTRKSEETITPWNFEEVVDKGASAQSFIERMTNFDKNLPNEKVLPKHSLLYEYFTVYNELTKVKYVTEGMRKPAFLSGEQKKAIVDLLFKTNRKVTVKQLKEDYFKKIECFDSVEISGVEDRFNASLGTYHDLLKIIKDKDFLDNEENEDILEDIVLTLTLFEDREMIEERLKTYAHLFDDKVMKQLKRRRYTGWGRLSRKLINGIRDKQSGKTILDFLKSDGFANRNFMQLIHDDSLTFKEDIQKAQVSGQGDSLHEHIANLAGSPAIKKGILQTVKVVDELVKVMGRHKPENIVIEMARENQTTQKGQKNSRERMKRIEEGIKELGSQILKEHPVENTQLQNEKLYLYYLQNGRDMYVDQELDINRLSDYDVDHIVPQSFLKDDSIDNKVLTRSDKNRGKSDNVPSEEVVKKMKNYWRQLLNAKLITQRKFDNLTKAERGGLSELDKAGFIKRQLVETRQITKHVAQILDSRMNTKYDENDKLIREVKVITLKSKLVSDFRKDFQFYKVREINNYHHAHDAYLNAVVGTALIKKYPKLESEFVYGDYKVYDVRKMIAKSEQEIGKATAKYFFYSNIMNFFKTEITLANGEIRKRPLIETNGETGEIVWDKGRDFATVRKVLSMPQVNIVKKTEVQTGGFSKESILPKRNSDKLIARKKDWDPKKYGGFDSPTVAYSVLVVAKVEKGKSKKLKSVKELLGITIMERSSFEKNPIDFLEAKGYKEVKKDLIIKLPKYSLFELENGRKRMLASAGELQKGNELALPSKYVNFLYLASHYEKLKGSPEDNEQKQLFVEQHKHYLDEIIEQISEFSKRVILADANLDKVLSAYNKHRDKPIREQAENIIHLFTLTNLGAPAAFKYFDTTIDRKRYTSTKEVLDATLIHQSITGLYETRIDLSQLGGD

SEQ ID NO: 285 - protein, 1545 aa, synthetic construct
  REGION 1..1545: note = 114 N-term single TadA helixtrunc 165-end delta 59-65 polypeptide sequence
MSEVEFSHEYWMRHALTLAKRARDEREVPVGAVLVLNNRVIGEGWNRTAHAEIMALRQGGLVMQNYRLIDATLYVTFEPCVMCAGAMIHSRIGRVVFGVRNAKTGAAGSLMDVLHYPGMNHRVEITEGILADECAALLCYFFRMPRSGGSSGGSSGSETPGTSESATPESSGGSSGGSDKKYSIGLAIGTNSVGWAVITDEYKVPSKKFKVLGNTDRHSIKKNLIGALLFDSGETAEATRLKRTARRRYTRRKNRICYLQEIFSNEMAKVDDSFFHRLEESFLVEEDKKHERHPIFGNIVDEVAYHEKYPTIYHLRKKLVDSTDKADLRLIYLALAHMIKFRGHFLIEGDLNPDNSDVDKLFIQLVQTYNQLFEENPINASGVDAKAILSARLSKSRRLENLIAQLPGEKKNGLFGNLIALSLGLTPNFKSNFDLAEDAKLQLSKDTYDDDLDNLLAQIGDQYADLFLAAKNLSDAILLSDILRVNTEITKAPLSASMIKRYDEHHQDLTLLKALVRQQLPEKYKEIFFDQSKNGYAGYIDGGASQEEFYKFIKPILEKMDGTEELLVKLNREDLLRKQRTFDNGSIPHQIHLGELHAILRRQEDFYPFLKDNREKIEKILTFRIPYYVGPLARGNSRFAWMTRKSEETITPWNFEEVVDKGASAQSFIERMTNFDKNLPNEKVLPKHSLLYEYFTVYNELTKVKYVTEGMRKPAFLSGEQKKAIVDLLFKTNRKVTVKQLKEDYFKKIECFDSVEISGVEDRFNASLGTYHDLLKIIKDKDFLDNEENEDILEDIVLTLTLFEDREMIEERLKTYAHLFDDKVMKQLKRRRYTGWGRLSRKLINGIRDKQSGKTILDFLKSDGFANRNFMQLIHDDSLTFKEDIQKAQVSGQGDSLHEHIANLAGSPAIKKGILQTVKVVDELVKVMGRHKPENIVIEMARENQTTQKGQKNSRERMKRIEEGIKELGSQILKEHPVENTQLQNEKLYLYYLQNGRDMYVDQELDINRLSDYDVDHIVPQSFLKDDSIDNKVLTRSDKNRGKSDNVPSEEVVKKMKNYWRQLLNAKLITQRKFDNLTKAERGGLSELDKAGFIKRQLVETRQITKHVAQILDSRMNTKYDENDKLIREVKVITLKSKLVSDFRKDFQFYKVREINNYHHAHDAYLNAVVGTALIKKYPKLESEFVYGDYKVYDVRKMIAKSEQEIGKATAKYFFYSNIMNFFKTEITLANGEIRKRPLIETNGETGEIVWDKGRDFATVRKVLSMPQVNIVKKTEVQTGGFSKESILPKRNSDKLIARKKDWDPKKYGGFDSPTVAYSVLVVAKVEKGKSKKLKSVKELLGITIMERSSFEKNPIDFLEAKGYKEVKKDLIIKLPKYSLFELENGRKRMLASAGELQKGNELALPSKYVNFLYLASHYEKLKGSPEDNEQKQLFVEQHKHYLDEIIEQISEFSKRVILADANLDKVLSAYNKHRDKPIREQAENIIHLFTLTNLGAPAAFKYFDTTIDRKRYTSTKEVLDATLIHQSITGLYETRIDLSQLGGD

SEQ ID NO: 286 - protein, 1541 aa, synthetic construct
  REGION 1..1541: note = 115.1 Cas9 TadAins 1004 polypeptide sequence
MDKKYSIGLAIGTNSVGWAVITDEYKVPSKKFKVLGNTDRHSIKKNLIGALLFDSGETAEATRLKRTARRRYTRRKNRICYLQEIFSNEMAKVDDSFFHRLEESFLVEEDKKHERHPIFGNIVDEVAYHEKYPTIYHLRKKLVDSTDKADLRLIYLALAHMIKFRGHFLIEGDLNPDNSDVDKLFIQLVQTYNQLFEENPINASGVDAKAILSARLSKSRRLENLIAQLPGEKKNGLFGNLIALSLGLTPNFKSNFDLAEDAKLQLSKDTYDDDLDNLLAQIGDQYADLFLAAKNLSDAILLSDILRVNTEITKAPLSASMIKRYDEHHQDLTLLKALVRQQLPEKYKEIFFDQSKNGYAGYIDGGASQEEFYKFIKPILEKMDGTEELLVKLNREDLLRKQRTFDNGSIPHQIHLGELHAILRRQEDFYPFLKDNREKIEKILTFRIPYYVGPLARGNSRFAWMTRKSEETITPWNFEEVVDKGASAQSFIERMTNFDKNLPNEKVLPKHSLLYEYFTVYNELTKVKYVTEGMRKPAFLSGEQKKAIVDLLFKTNRKVTVKQLKEDYFKKIECFDSVEISGVEDRFNASLGTYHDLLKIIKDKDFLDNEENEDILEDIVLTLTLFEDREMIEERLKTYAHLFDDKVMKQLKRRRYTGWGRLSRKLINGIRDKQSGKTILDFLKSDGFANRNFMQLIHDDSLTFKEDIQKAQVSGQGDSLHEHIANLAGSPAIKKGILQTVKVVDELVKVMGRHKPENIVIEMARENQTTQKGQKNSRERMKRIEEGIKELGSQILKEHPVENTQLQNEKLYLYYLQNGRDMYVDQELDINRLSDYDVDHIVPQSFLKDDSIDNKVLTRSDKNRGKSDNVPSEEVVKKMKNYWRQLLNAKLITQRKFDNLTKAERGGLSELDKAGFIKRQLVETRQITKHVAQILDSRMNTKYDENDKLIREVKVITLKSKLVSDFRKDFQFYKVREINNYHHAHDAYLNAVVGTALIKKYPKGSSGSETPGTSESATPESSGSEVEFSHEYWMRHALTLAKRARDEREVPVGAVLVLNNRVIGEGWNRAIGLHDPTAHAEIMALRQGGLVMQNYRLIDATLYVTFEPCVMCAGAMIHSRIGRVVFGVRNAKTGAAGSLMDVLHYPGMNHRVEITEGILADECAALLCYFFRMPRQLESEFVYGDYKVYDVRKMIAKSEQEIGKATAKYFFYSNIMNFFKTEITLANGEIRKRPLIETNGETGEIVWDKGRDFATVRKVLSMPQVNIVKKTEVQTGGFSKESILPKRNSDKLIARKKDWDPKKYGGFDSPTVAYSVLVVAKVEKGKSKKLKSVKELLGITIMERSSFEKNPIDFLEAKGYKEVKKDLIIKLPKYSLFELENGRKRMLASAGELQKGNELALPSKYVNFLYLASHYEKLKGSPEDNEQKQLFVEQHKHYLDEIIEQISEFSKRVILADANLDKVLSAYNKHRDKPIREQAENIIHLFTLTNLGAPAAFKYFDTTIDRKRYTSTKEVLDATLIHQSITGLYETRIDLSQLGGD

SEQ ID NO: 287 - protein, 1541 aa, synthetic construct
  REGION 1..1541: note = 115.2 Cas9 TadAins 1005 polypeptide sequence
MDKKYSIGLAIGTNSVGWAVITDEYKVPSKKFKVLGNTDRHSIKKNLIGALLFDSGETAEATRLKRTARRRYTRRKNRICYLQEIFSNEMAKVDDSFFHRLEESFLVEEDKKHERHPIFGNIVDEVAYHEKYPTIYHLRKKLVDSTDKADLRLIYLALAHMIKFRGHFLIEGDLNPDNSDVDKLFIQLVQTYNQLFEENPINASGVDAKAILSARLSKSRRLENLIAQLPGEKKNGLFGNLIALSLGLTPNFKSNFDLAEDAKLQLSKDTYDDDLDNLLAQIGDQYADLFLAAKNLSDAILLSDILRVNTEITKAPLSASMIKRYDEHHQDLTLLKALVRQQLPEKYKEIFFDQSKNGYAGYIDGGASQEEFYKFIKPILEKMDGTEELLVKLNREDLLRKQRTFDNGSIPHQIHLGELHAILRRQEDFYPFLKDNREKIEKILTFRIPYYVGPLARGNSRFAWMTRKSEETITPWNFEEVVDKGASAQSFIERMTNFDKNLPNEKVLPKHSLLYEYFTVYNELTKVKYVTEGMRKPAFLSGEQKKAIVDLLFKTNRKVTVKQLKEDYFKKIECFDSVEISGVEDRFNASLGTYHDLLKIIKDKDFLDNEENEDILEDIVLTLTLFEDREMIEERLKTYAHLFDDKVMKQLKRRRYTGWGRLSRKLINGIRDKQSGKTILDFLKSDGFANRNFMQLIHDDSLTFKEDIQKAQVSGQGDSLHEHIANLAGSPAIKKGILQTVKVVDELVKVMGRHKPENIVIEMARENQTTQKGQKNSRERMKRIEEGIKELGSQILKEHPVENTQLQNEKLYLYYLQNGRDMYVDQELDINRLSDYDVDHIVPQSFLKDDSIDNKVLTRSDKNRGKSDNVPSEEVVKKMKNYWRQLLNAKLITQRKFDNLTKAERGGLSELDKAGFIKRQLVETRQITKHVAQILDSRMNTKYDENDKLIREVKVITLKSKLVSDFRKDFQFYKVREINNYHHAHDAYLNAVVGTALIKKYPKLGSSGSETPGTSESATPESSGSEVEFSHEYWMRHALTLAKRARDEREVPVGAVLVLNNRVIGEGWNRAIGLHDPTAHAEIMALRQGGLVMQNYRLIDATLYVTFEPCVMCAGAMIHSRIGRVVFGVRNAKTGAAGSLMDVLHYPGMNHRVEITEGILADECAALLCYFFRMPRQESEFVYGDYKVYDVRKMIAKSEQEIGKATAKYFFYSNIMNFFKTEITLANGEIRKRPLIETNGETGEIVWDKGRDFATVRKVLSMPQVNIVKKTEVQTGGFSKESILPKRNSDKLIARKKDWDPKKYGGFDSPTVAYSVLVVAKVEKGKSKKLKSVKELLGITIMERSSFEKNPIDFLEAKGYKEVKKDLIIKLPKYSLFELENGRKRMLASAGELQKGNELALPSKYVNFLYLASHYEKLKGSPEDNEQKQLFVEQHKHYLDEIIEQISEFSKRVILADANLDKVLSAYNKHRDKPIREQAENIIHLFTLTNLGAPAAFKYFDTTIDRKRYTSTKEVLDATLIHQSITGLYETRIDLSQLGGD

SEQ ID NO: 288 - protein, 1541 aa, synthetic construct
  REGION 1..1541: note = 115.3 Cas9 TadAins 1006 polypeptide sequence
MDKKYSIGLAIGTNSVGWAVITDEYKVPSKKFKVLGNTDRHSIKKNLIGALLFDSGETAEATRLKRTARRRYTRRKNRICYLQEIFSNEMAKVDDSFFHRLEESFLVEEDKKHERHPIFGNIVDEVAYHEKYPTIYHLRKKLVDSTDKADLRLIYLALAHMIKFRGHFLIEGDLNPDNSDVDKLFIQLVQTYNQLFEENPINASGVDAKAILSARLSKSRRLENLIAQLPGEKKNGLFGNLIALSLGLTPNFKSNFDLAEDAKLQLSKDTYDDDLDNLLAQIGDQYADLFLAAKNLSDAILLSDILRVNTEITKAPLSASMIKRYDEHHQDLTLLKALVRQQLPEKYKEIFFDQSKNGYAGYIDGGASQEEFYKFIKPILEKMDGTEELLVKLNREDLLRKQRTFDNGSIPHQIHLGELHAILRRQEDFYPFLKDNREKIEKILTFRIPYYVGPLARGNSRFAWMTRKSEETITPWNFEEVVDKGASAQSFIERMTNFDKNLPNEKVLPKHSLLYEYFTVYNELTKVKYVTEGMRKPAFLSGEQKKAIVDLLFKTNRKVTVKQLKEDYFKKIECFDSVEISGVEDRFNASLGTYHDLLKIIKDKDFLDNEENEDILEDIVLTLTLFEDREMIEERLKTYAHLFDDKVMKQLKRRRYTGWGRLSRKLINGIRDKQSGKTILDFLKSDGFANRNFMQLIHDDSLTFKEDIQKAQVSGQGDSLHEHIANLAGSPAIKKGILQTVKVVDELVKVMGRHKPENIVIEMARENQTTQKGQKNSRERMKRIEEGIKELGSQILKEHPVENTQLQNEKLYLYYLQNGRDMYVDQELDINRLSDYDVDHIVPQSFLKDDSIDNKVLTRSDKNRGKSDNVPSEEVVKKMKNYWRQLLNAKLITQRKFDNLTKAERGGLSELDKAGFIKRQLVETRQITKHVAQILDSRMNTKYDENDKLIREVKVITLKSKLVSDFRKDFQFYKVREINNYHHAHDAYLNAVVGTALIKKYPKLEGSSGSETPGTSESATPESSGSEVEFSHEYWMRHALTLAKRARDEREVPVGAVLVLNNRVIGEGWNRAIGLHDPTAHAEIMALRQGGLVMQNYRLIDATLYVTFEPCVMCAGAMIHSRIGRVVFGVRNAKTGAAGSLMDVLHYPGMNHRVEITEGILADECAALLCYFFRMPRQSEFVYGDYKVYDVRKMIAKSEQEIGKATAKYFFYSNIMNFFKTEITLANGEIRKRPLIETNGETGEIVWDKGRDFATVRKVLSMPQVNIVKKTEVQTGGFSKESILPKRNSDKLIARKKDWDPKKYGGFDSPTVAYSVLVVAKVEKGKSKKLKSVKELLGITIMERSSFEKNPIDFLEAKGYKEVKKDLIIKLPKYSLFELENGRKRMLASAGELQKGNELALPSKYVNFLYLASHYEKLKGSPEDNEQKQLFVEQHKHYLDEIIEQISEFSKRVILADANLDKVLSAYNKHRDKPIREQAENIIHLFTLTNLGAPAAFKYFDTTIDRKRYTSTKEVLDATLIHQSITGLYETRIDLSQLGGD

SEQ ID NO: 289 - protein, 1541 aa, synthetic construct
  REGION 1..1541: note = 115.4 Cas9 TadAins 1007 polypeptide sequence
MDKKYSIGLAIGTNSVGWAVITDEYKVPSKKFKVLGNTDRHSIKKNLIGALLFDSGETAEATRLKRTARRRYTRRKNRICYLQEIFSNEMAKVDDSFFHRLEESFLVEEDKKHERHPIFGNIVDEVAYHEKYPTIYHLRKKLVDSTDKADLRLIYLALAHMIKFRGHFLIEGDLNPDNSDVDKLFIQLVQTYNQLFEENPINASGVDAKAILSARLSKSRRLENLIAQLPGEKKNGLFGNLIALSLGLTPNFKSNFDLAEDAKLQLSKDTYDDDLDNLLAQIGDQYADLFLAAKNLSDAILLSDILRVNTEITKAPLSASMIKRYDEHHQDLTLLKALVRQQLPEKYKEIFFDQSKNGYAGYIDGGASQEEFYKFIKPILEKMDGTEELLVKLNREDLLRKQRTFDNGSIPHQIHLGELHAILRRQEDFYPFLKDNREKIEKILTFRIPYYVGPLARGNSRFAWMTRKSEETITPWNFEEVVDKGASAQSFIERMTNFDKNLPNEKVLPKHSLLYEYFTVYNELTKVKYVTEGMRKPAFLSGEQKKAIVDLLFKTNRKVTVKQLKEDYFKKIECFDSVEISGVEDRFNASLGTYHDLLKIIKDKDFLDNEENEDILEDIVLTLTLFEDREMIEERLKTYAHLFDDKVMKQLKRRRYTGWGRLSRKLINGIRDKQSGKTILDFLKSDGFANRNFMQLIHDDSLTFKEDIQKAQVSGQGDSLHEHIANLAGSPAIKKGILQTVKVVDELVKVMGRHKPENIVIEMARENQTTQKGQKNSRERMKRIEEGIKELGSQILKEHPVENTQLQNEKLYLYYLQNGRDMYVDQELDINRLSDYDVDHIVPQSFLKDDSIDNKVLTRSDKNRGKSDNVPSEEVVKKMKNYWRQLLNAKLITQRKFDNLTKAERGGLSELDKAGFIKRQLVETRQITKHVAQILDSRMNTKYDENDKLIREVKVITLKSKLVSDFRKDFQFYKVREINNYHHAHDAYLNAVVGTALIKKYPKLESGSSGSETPGTSESATPESSGSEVEFSHEYWMRHALTLAKRARDEREVPVGAVLVLNNRVIGEGWNRAIGLHDPTAHAEIMALRQGGLVMQNYRLIDATLYVTFEPCVMCAGAMIHSRIGRVVFGVRNAKTGAAGSLMDVLHYPGMNHRVEITEGILADECAALLCYFFRMPRQEFVYGDYKVYDVRKMIAKSEQEIGKATAKYFFYSNIMNFFKTEITLANGEIRKRPLIETNGETGEIVWDKGRDFATVRKVLSMPQVNIVKKTEVQTGGFSKESILPKRNSDKLIARKKDWDPKKYGGFDSPTVAYSVLVVAKVEKGKSKKLKSVKELLGITIMERSSFEKNPIDFLEAKGYKEVKKDLIIKLPKYSLFELENGRKRMLASAGELQKGNELALPSKYVNFLYLASHYEKLKGSPEDNEQKQLFVEQHKHYLDEIIEQISEFSKRVILADANLDKVLSAYNKHRDKPIREQAENIIHLFTLTNLGAPAAFKYFDTTIDRKRYTSTKEVLDATLIHQSITGLYETRIDLSQLGGD

SEQ ID NO: 290 - protein, 1541 aa, synthetic construct
  REGION 1..1541: note = 116.1 Cas9 TadAins C-term truncate 792 polypeptide sequence
MDKKYSIGLAIGTNSVGWAVITDEYKVPSKKFKVLGNTDRHSIKKNLIGALLFDSGETAEATRLKRTARRRYTRRKNRICYLQEIFSNEMAKVDDSFFHRLEESFLVEEDKKHERHPIFGNIVDEVAYHEKYPTIYHLRKKLVDSTDKADLRLIYLALAHMIKFRGHFLIEGDLNPDNSDVDKLFIQLVQTYNQLFEENPINASGVDAKAILSARLSKSRRLENLIAQLPGEKKNGLFGNLIALSLGLTPNFKSNFDLAEDAKLQLSKDTYDDDLDNLLAQIGDQYADLFLAAKNLSDAILLSDILRVNTEITKAPLSASMIKRYDEHHQDLTLLKALVRQQLPEKYKEIFFDQSKNGYAGYIDGGASQEEFYKFIKPILEKMDGTEELLVKLNREDLLRKQRTFDNGSIPHQIHLGELHAILRRQEDFYPFLKDNREKIEKILTFRIPYYVGPLARGNSRFAWMTRKSEETITPWNFEEVVDKGASAQSFIERMTNFDKNLPNEKVLPKHSLLYEYFTVYNELTKVKYVTEGMRKPAFLSGEQKKAIVDLLFKTNRKVTVKQLKEDYFKKIECFDSVEISGVEDRFNASLGTYHDLLKIIKDKDFLDNEENEDILEDIVLTLTLFEDREMIEERLKTYAHLFDDKVMKQLKRRRYTGWGRLSRKLINGIRDKQSGKTILDFLKSDGFANRNFMQLIHDDSLTFKEDIQKAQVSGQGDSLHEHIANLAGSPAIKKGILQTVKVVDELVKVMGRHKPENIVIEMARENQTTQKGQKNSRERMKRIEEGIKELGGSSGSETPGTSESATPESSGSEVEFSHEYWMRHALTLAKRARDEREVPVGAVLVLNNRVIGEGWNRAIGLHDPTAHAEIMALRQGGLVMQNYRLIDATLYVTFEPCVMCAGAMIHSRIGRVVFGVRNAKTGAAGSLMDVLHYPGMNHRVEITEGILADECAALLCYFFRMPRQSQILKEHPVENTQLQNEKLYLYYLQNGRDMYVDQELDINRLSDYDVDHIVPQSFLKDDSIDNKVLTRSDKNRGKSDNVPSEEVVKKMKNYWRQLLNAKLITQRKFDNLTKAERGGLSELDKAGFIKRQLVETRQITKHVAQILDSRMNTKYDENDKLIREVKVITLKSKLVSDFRKDFQFYKVREINNYHHAHDAYLNAVVGTALIKKYPKLESEFVYGDYKVYDVRKMIAKSEQEIGKATAKYFFYSNIMNFFKTEITLANGEIRKRPLIETNGETGEIVWDKGRDFATVRKVLSMPQVNIVKKTEVQTGGFSKESILPKRNSDKLIARKKDWDPKKYGGFDSPTVAYSVLVVAKVEKGKSKKLKSVKELLGITIMERSSFEKNPIDFLEAKGYKEVKKDLIIKLPKYSLFELENGRKRMLASAGELQKGNELALPSKYVNFLYLASHYEKLKGSPEDNEQKQLFVEQHKHYLDEIIEQISEFSKRVILADANLDKVLSAYNKHRDKPIREQAENIIHLFTLTNLGAPAAFKYFDTTIDRKRYTSTKEVLDATLIHQSITGLYETRIDLSQLGGD

SEQ ID NO: 291 - protein, 1541 aa, synthetic construct
  REGION 1..1541: note = 116.2 Cas9 TadAins C-term truncate 791 polypeptide sequence
MDKKYSIGLAIGTNSVGWAVITDEYKVPSKKFKVLGNTDRHSIKKNLIGALLFDSGETAEATRLKRTARRRYTRRKNRICYLQEIFSNEMAKVDDSFFHRLEESFLVEEDKKHERHPIFGNIVDEVAYHEKYPTIYHLRKKLVDSTDKADLRLIYLALAHMIKFRGHFLIEGDLNPDNSDVDKLFIQLVQTYNQLFEENPINASGVDAKAILSARLSKSRRLENLIAQLPGEKKNGLFGNLIALSLGLTPNFKSNFDLAEDAKLQLSKDTYDDDLDNLLAQIGDQYADLFLAAKNLSDAILLSDILRVNTEITKAPLSASMIKRYDEHHQDLTLLKALVRQQLPEKYKEIFFDQSKNGYAGYIDGGASQEEFYKFIKPILEKMDGTEELLVKLNREDLLRKQRTFDNGSIPHQIHLGELHAILRRQEDFYPFLKDNREKIEKILTFRIPYYVGPLARGNSRFAWMTRKSEETITPWNFEEVVDKGASAQSFIERMTNFDKNLPNEKVLPKHSLLYEYFTVYNELTKVKYVTEGMRKPAFLSGEQKKAIVDLLFKTNRKVTVKQLKEDYFKKIECFDSVEISGVEDRFNASLGTYHDLLKIIKDKDFLDNEENEDILEDIVLTLTLFEDREMIEERLKTYAHLFDDKVMKQLKRRRYTGWGRLSRKLINGIRDKQSGKTILDFLKSDGFANRNFMQLIHDDSLTFKEDIQKAQVSGQGDSLHEHIANLAGSPAIKKGILQTVKVVDELVKVMGRHKPENIVIEMARENQTTQKGQKNSRERMKRIEEGIKELGSSGSETPGTSESATPESSGSEVEFSHEYWMRHALTLAKRARDEREVPVGAVLVLNNRVIGEGWNRAIGLHDPTAHAEIMALRQGGLVMQNYRLIDATLYVTFEPCVMCAGAMIHSRIGRVVFGVRNAKTGAAGSLMDVLHYPGMNHRVEITEGILADECAALLCYFFRMPRQGSQILKEHPVENTQLQNEKLYLYYLQNGRDMYVDQELDINRLSDYDVDHIVPQSFLKDDSIDNKVLTRSDKNRGKSDNVPSEEVVKKMKNYWRQLLNAKLITQRKFDNLTKAERGGLSELDKAGFIKRQLVETRQITKHVAQILDSRMNTKYDENDKLIREVKVITLKSKLVSDFRKDFQFYKVREINNYHHAHDAYLNAVVGTALIKKYPKLESEFVYGDYKVYDVRKMIAKSEQEIGKATAKYFFYSNIMNFFKTEITLANGEIRKRPLIETNGETGEIVWDKGRDFATVRKVLSMPQVNIVKKTEVQTGGFSKESILPKRNSDKLIARKKDWDPKKYGGFDSPTVAYSVLVVAKVEKGKSKKLKSVKELLGITIMERSSFEKNPIDFLEAKGYKEVKKDLIIKLPKYSLFELENGRKRMLASAGELQKGNELALPSKYVNFLYLASHYEKLKGSPEDNEQKQLFVEQHKHYLDEIIEQISEFSKRVILADANLDKVLSAYNKHRDKPIREQAENIIHLFTLTNLGAPAAFKYFDTTIDRKRYTSTKEVLDATLIHQSITGLYETRIDLSQLGGD

SEQ ID NO: 292 - protein, 1541 aa, synthetic construct
  REGION 1..1541: note = 116.3 Cas9 TadAins C-term truncate 790 polypeptide sequence
MDKKYSIGLAIGTNSVGWAVITDEYKVPSKKFKVLGNTDRHSIKKNLIGALLFDSGETAEATRLKRTARRRYTRRKNRICYLQEIFSNEMAKVDDSFFHRLEESFLVEEDKKHERHPIFGNIVDEVAYHEKYPTIYHLRKKLVDSTDKADLRLIYLALAHMIKFRGHFLIEGDLNPDNSDVDKLFIQLVQTYNQLFEENPINASGVDAKAILSARLSKSRRLENLIAQLPGEKKNGLFGNLIALSLGLTPNFKSNFDLAEDAKLQLSKDTYDDDLDNLLAQIGDQYADLFLAAKNLSDAILLSDILRVNTEITKAPLSASMIKRYDEHHQDLTLLKALVRQQLPEKYKEIFFDQSKNGYAGYIDGGASQEEFYKFIKPILEKMDGTEELLVKLNREDLLRKQRTFDNGSIPHQIHLGELHAILRRQEDFYPFLKDNREKIEKILTFRIPYYVGPLARGNSRFAWMTRKSEETITPWNFEEVVDKGASAQSFIERMTNFDKNLPNEKVLPKHSLLYEYFTVYNELTKVKYVTEGMRKPAFLSGEQKKAIVDLLFKTNRKVTVKQLKEDYFKKIECFDSVEISGVEDRFNASLGTYHDLLKIIKDKDFLDNEENEDILEDIVLTLTLFEDREMIEERLKTYAHLFDDKVMKQLKRRRYTGWGRLSRKLINGIRDKQSGKTILDFLKSDGFANRNFMQLIHDDSLTFKEDIQKAQVSGQGDSLHEHIANLAGSPAIKKGILQTVKVVDELVKVMGRHKPENIVIEMARENQTTQKGQKNSRERMKRIEEGIKEGSSGSETPGTSESATPESSGSEVEFSHEYWMRHALTLAKRARDEREVPVGAVLVLNNRVIGEGWNRAIGLHDPTAHAEIMALRQGGLVMQNYRLIDATLYVTFEPCVMCAGAMIHSRIGRVVFGVRNAKTGAAGSLMDVLHYPGMNHRVEITEGILADECAALLCYFFRMPRQLGSQILKEHPVENTQLQNEKLYLYYLQNGRDMYVDQELDINRLSDYDVDHIVPQSFLKDDSIDNKVLTRSDKNRGKSDNVPSEEVVKKMKNYWRQLLNAKLITQRKFDNLTKAERGGLSELDKAGFIKRQLVETRQITKHVAQILDSRMNTKYDENDKLIREVKVITLKSKLVSDFRKDFQFYKVREINNYHHAHDAYLNAVVGTALIKKYPKLESEFVYGDYKVYDVRKMIAKSEQEIGKATAKYFFYSNIMNFFKTEITLANGEIRKRPLIETNGETGEIVWDKGRDFATVRKVLSMPQVNIVKKTEVQTGGFSKESILPKRNSDKLIARKKDWDPKKYGGFDSPTVAYSVLVVAKVEKGKSKKLKSVKELLGITIMERSSFEKNPIDFLEAKGYKEVKKDLIIKLPKYSLFELENGRKRMLASAGELQKGNELALPSKYVNFLYLASHYEKLKGSPEDNEQKQLFVEQHKHYLDEIIEQISEFSKRVILADANLDKVLSAYNKHRDKPIREQAENIIHLFTLTNLGAPAAFKYFDTTIDRKRYTSTKEVLDATLIHQSITGLYETRIDLSQLGGD

SEQ ID NO: 293 - protein, 1484 aa, synthetic construct
  REGION 1..1484: note = 117 Cas9 delta 1017-1069 polypeptide sequence
MDKKYSIGLAIGTNSVGWAVITDEYKVPSKKFKVLGNTDRHSIKKNLIGALLFDSGETAEATRLKRTARRRYTRRKNRICYLQEIFSNEMAKVDDSFFHRLEESFLVEEDKKHERHPIFGNIVDEVAYHEKYPTIYHLRKKLVDSTDKADLRLIYLALAHMIKFRGHFLIEGDLNPDNSDVDKLFIQLVQTYNQLFEENPINASGVDAKAILSARLSKSRRLENLIAQLPGEKKNGLFGNLIALSLGLTPNFKSNFDLAEDAKLQLSKDTYDDDLDNLLAQIGDQYADLFLAAKNLSDAILLSDILRVNTEITKAPLSASMIKRYDEHHQDLTLLKALVRQQLPEKYKEIFFDQSKNGYAGYIDGGASQEEFYKFIKPILEKMDGTEELLVKLNREDLLRKQRTFDNGSIPHQIHLGELHAILRRQEDFYPFLKDNREKIEKILTFRIPYYVGPLARGNSRFAWMTRKSEETITPWNFEEVVDKGASAQSFIERMTNFDKNLPNEKVLPKHSLLYEYFTVYNELTKVKYVTEGMRKPAFLSGEQKKAIVDLLFKTNRKVTVKQLKEDYFKKIECFDSVEISGVEDRFNASLGTYHDLLKIIKDKDFLDNEENEDILEDIVLTLTLFEDREMIEERLKTYAHLFDDKVMKQLKRRRYTGWGRLSRKLINGIRDKQSGKTILDFLKSDGFANRNFMQLIHDDSLTFKEDIQKAQVSGQGDSLHEHIANLAGSPAIKKGILQTVKVVDELVKVMGRHKPENIVIEMARENQTTQKGQKNSRERMKRIEEGIKELGSQILKEHPVENTQLQNEKLYLYYLQNGRDMYVDQELDINRLSDYDVDHIVPQSFLKDDSIDNKVLTRSDKNRGKSDNVPSEEVVKKMKNYWRQLLNAKLITQRKFDNLTKAERGGLSELDKAGFIKRQLVETRQITKHVAQILDSRMNTKYDENDKLIREVKVITLKSKLVSDFRKDFQFYKVREINNYHHAHDAYLNAVVGTALIKKYPKLESEFVYGDYKVYSSGSEVEFSHEYWMRHALTLAKRARDEREVPVGAVLVLNNRVIGEGWNRAIGLHDPTAHAEIMALRQGGLVMQNYRLIDATLYVTFEPCVMCAGAMIHSRIGRVVFGVRNAKTGAAGSLMDVLHYPGMNHRVEITEGILADECAALLCYFFRMPRQVFNAQKKAQSSTDGEIVWDKGRDFATVRKVLSMPQVNIVKKTEVQTGGFSKESILPKRNSDKLIARKKDWDPKKYGGFDSPTVAYSVLVVAKVEKGKSKKLKSVKELLGITIMERSSFEKNPIDFLEAKGYKEVKKDLIIKLPKYSLFELENGRKRMLASAGELQKGNELALPSKYVNFLYLASHYEKLKGSPEDNEQKQLFVEQHKHYLDEIIEQISEFSKRVILADANLDKVLSAYNKHRDKPIREQAENIIHLFTLTNLGAPAAFKYFDTTIDRKRYTSTKEVLDATLIHQSITGLYETRIDLSQLGGD

SEQ ID NO: 294 - protein, 1554 aa, synthetic construct
  REGION 1..1554: note = 118 Cas9 TadA-CP116ins 1067 polypeptide sequence
MDKKYSIGLAIGTNSVGWAVITDEYKVPSKKFKVLGNTDRHSIKKNLIGALLFDSGETAEATRLKRTARRRYTRRKNRICYLQEIFSNEMAKVDDSFFHRLEESFLVEEDKKHERHPIFGNIVDEVAYHEKYPTIYHLRKKLVDSTDKADLRLIYLALAHMIKFRGHFLIEGDLNPDNSDVDKLFIQLVQTYNQLFEENPINASGVDAKAILSARLSKSRRLENLIAQLPGEKKNGLFGNLIALSLGLTPNFKSNFDLAEDAKLQLSKDTYDDDLDNLLAQIGDQYADLFLAAKNLSDAILLSDILRVNTEITKAPLSASMIKRYDEHHQDLTLLKALVRQQLPEKYKEIFFDQSKNGYAGYIDGGASQEEFYKFIKPILEKMDGTEELLVKLNREDLLRKQRTFDNGSIPHQIHLGELHAILRRQEDFYPFLKDNREKIEKILTFRIPYYVGPLARGNSRFAWMTRKSEETITPWNFEEVVDKGASAQSFIERMTNFDKNLPNEKVLPKHSLLYEYFTVYNELTKVKYVTEGMRKPAFLSGEQKKAIVDLLFKTNRKVTVKQLKEDYFKKIECFDSVEISGVEDRFNASLGTYHDLLKIIKDKDFLDNEENEDILEDIVLTLTLFEDREMIEERLKTYAHLFDDKVMKQLKRRRYTGWGRLSRKLINGIRDKQSGKTILDFLKSDGFANRNFMQLIHDDSLTFKEDIQKAQVSGQGDSLHEHIANLAGSPAIKKGILQTVKVVDELVKVMGRHKPENIVIEMARENQTTQKGQKNSRERMKRIEEGIKELGSQILKEHPVENTQLQNEKLYLYYLQNGRDMYVDQELDINRLSDYDVDHIVPQSFLKDDSIDNKVLTRSDKNRGKSDNVPSEEVVKKMKNYWRQLLNAKLITQRKFDNLTKAERGGLSELDKAGFIKRQLVETRQITKHVAQILDSRMNTKYDENDKLIREVKVITLKSKLVSDFRKDFQFYKVREINNYHHAHDAYLNAVVGTALIKKYPKLESEFVYGDYKVYDVRKMIAKSEQEIGKATAKYFFYSNIMNFFKTEITLANGEIRKRPLIETNMNHRVEITEGILADECAALLCYFFRMPRQVFNAQKKAQSSTDGSSGSETPGTSESATPESSGSEVEFSHEYWMRHALTLAKRARDEREVPVGAVLVLNNRVIGEGWNRAIGLHDPTAHAEIMALRQGGLVMQNYRLIDATLYVTFEPCVMCAGAMIHSRIGRVVFGVRNAKTGAAGSLMDVLHYPGGETGEIVWDKGRDFATVRKVLSMPQVNIVKKTEVQTGGFSKESILPKRNSDKLIARKKDWDPKKYGGFDSPTVAYSVLVVAKVEKGKSKKLKSVKELLGITIMERSSFEKNPIDFLEAKGYKEVKKDLIIKLPKYSLFELENGRKRMLASAGELQKGNELALPSKYVNFLYLASHYEKLKGSPEDNEQKQLFVEQHKHYLDEIIEQISEFSKRVILADANLDKVLSAYNKHRDKPIREQAENIIHLFTLTNLGAPAAFKYFDTTIDRKRYTSTKEVLDATLIHQSITGLYETRIDLSQLGGD

SEQ ID NO: 295 - protein, 1554 aa, synthetic construct
  REGION 1..1554: note = 119 Cas9 TadAins 701 polypeptide sequence
MDKKYSIGLAIGTNSVGWAVITDEYKVPSKKFKVLGNTDRHSIKKNLIGALLFDSGETAEATRLKRTARRRYTRRKNRICYLQEIFSNEMAKVDDSFFHRLEESFLVEEDKKHERHPIFGNIVDEVAYHEKYPTIYHLRKKLVDSTDKADLRLIYLALAHMIKFRGHFLIEGDLNPDNSDVDKLFIQLVQTYNQLFEENPINASGVDAKAILSARLSKSRRLENLIAQLPGEKKNGLFGNLIALSLGLTPNFKSNFDLAEDAKLQLSKDTYDDDLDNLLAQIGDQYADLFLAAKNLSDAILLSDILRVNTEITKAPLSASMIKRYDEHHQDLTLLKALVRQQLPEKYKEIFFDQSKNGYAGYIDGGASQEEFYKFIKPILEKMDGTEELLVKLNREDLLRKQRTFDNGSIPHQIHLGELHAILRRQEDFYPFLKDNREKIEKILTFRIPYYVGPLARGNSRFAWMTRKSEETITPWNFEEVVDKGASAQSFIERMTNFDKNLPNEKVLPKHSLLYEYFTVYNELTKVKYVTEGMRKPAFLSGEQKKAIVDLLFKTNRKVTVKQLKEDYFKKIECFDSVEISGVEDRFNASLGTYHDLLKIIKDKDFLDNEENEDILEDIVLTLTLFEDREMIEERLKTYAHLFDDKVMKQLKRRRYTGWGRLSRKLINGIRDKQSGKTILDFLKSDGFANRNFMQLIHDDSGSSGSETPGTSESATPESSGSEVEFSHEYWMRHALTLAKRARDEREVPVGAVLVLNNRVIGEGWNRAIGLHDPTAHAEIMALRQGGLVMQNYRLIDATLYVTFEPCVMCAGAMIHSRIGRVVFGVRNAKTGAAGSLMDVLHYPGMNHRVEITEGILADECAALLCYFFRMPRQVFNAQKKAQSSTDLTFKEDIQKAQVSGQGDSLHEHIANLAGSPAIKKGILQTVKVVDELVKVMGRHKPENIVIEMARENQTTQKGQKNSRERMKRIEEGIKELGSQILKEHPVENTQLQNEKLYLYYLQNGRDMYVDQELDINRLSDYDVDHIVPQSFLKDDSIDNKVLTRSDKNRGKSDNVPSEEVVKKMKNYWRQLLNAKLITQRKFDNLTKAERGGLSELDKAGFIKRQLVETRQITKHVAQILDSRMNTKYDENDKLIREVKVITLKSKLVSDFRKDFQFYKVREINNYHHAHDAYLNAVVGTALIKKYPKLESEFVYGDYKVYDVRKMIAKSEQEIGKATAKYFFYSNIMNFFKTEITLANGEIRKRPLIETNGETGEIVWDKGRDFATVRKVLSMPQVNIVKKTEVQTGGFSKESILPKRNSDKLIARKKDWDPKKYGGFDSPTVAYSVLVVAKVEKGKSKKLKSVKELLGITIMERSSFEKNPIDFLEAKGYKEVKKDLIIKLPKYSLFELENGRKRMLASAGELQKGNELALPSKYVNFLYLASHYEKLKGSPEDNEQKQLFVEQHKHYLDEIIEQISEFSKRVILADANLDKVLSAYNKHRDKPIREQAENIIHLFTLTNLGAPAAFKYFDTTIDRKRYTSTKEVLDATLIHQSITGLYETRIDLSQLGGD

SEQ ID NO: 296 - protein, 1554 aa, synthetic construct
  REGION 1..1554: note = 120 Cas9 TadACP136ins 1248 polypeptide sequence
MDKKYSIGLAIGTNSVGWAVITDEYKVPSKKFKVLGNTDRHSIKKNLIGALLFDSGETAEATRLKRTARRRYTRRKNRICYLQEIFSNEMAKVDDSFFHRLEESFLVEEDKKHERHPIFGNIVDEVAYHEKYPTIYHLRKKLVDSTDKADLRLIYLALAHMIKFRGHFLIEGDLNPDNSDVDKLFIQLVQTYNQLFEENPINASGVDAKAILSARLSKSRRLENLIAQLPGEKKNGLFGNLIALSLGLTPNFKSNFDLAEDAKLQLSKDTYDDDLDNLLAQIGDQYADLFLAAKNLSDAILLSDILRVNTEITKAPLSASMIKRYDEHHQDLTLLKALVRQQLPEKYKEIFFDQSKNGYAGYIDGGASQEEFYKFIKPILEKMDGTEELLVKLNREDLLRKQRTFDNGSIPHQIHLGELHAILRRQEDFYPFLKDNREKIEKILTFRIPYYVGPLARGNSRFAWMTRKSEETITPWNFEEVVDKGASAQSFIERMTNFDKNLPNEKVLPKHSLLYEYFTVYNELTKVKYVTEGMRKPAFLSGEQKKAIVDLLFKTNRKVTVKQLKEDYFKKIECFDSVEISGVEDRFNASLGTYHDLLKIIKDKDFLDNEENEDILEDIVLTLTLFEDREMIEERLKTYAHLFDDKVMKQLKRRRYTGWGRLSRKLINGIRDKQSGKTILDFLKSDGFANRNFMQLIHDDSLTFKEDIQKAQVSGQGDSLHEHIANLAGSPAIKKGILQTVKVVDELVKVMGRHKPENIVIEMARENQTTQKGQKNSRERMKRIEEGIKELGSQILKEHPVENTQLQNEKLYLYYLQNGRDMYVDQELDINRLSDYDVDHIVPQSFLKDDSIDNKVLTRSDKNRGKSDNVPSEEVVKKMKNYWRQLLNAKLITQRKFDNLTKAERGGLSELDKAGFIKRQLVETRQITKHVAQILDSRMNTKYDENDKLIREVKVITLKSKLVSDFRKDFQFYKVREINNYHHAHDAYLNAVVGTALIKKYPKLESEFVYGDYKVYDVRKMIAKSEQEIGKATAKYFFYSNIMNFFKTEITLANGEIRKRPLIETNGETGEIVWDKGRDFATVRKVLSMPQVNIVKKTEVQTGGFSKESILPKRNSDKLIARKKDWDPKKYGGFDSPTVAYSVLVVAKVEKGKSKKLKSVKELLGITIMERSSFEKNPIDFLEAKGYKEVKKDLIIKLPKYSLFELENGRKRMLASAGELQKGNELALPSKYVNFLYLASHYEKLKGSMNHRVEITEGILADECAALLCYFFRMPRQVFNAQKKAQSSTDGSSGSETPGTSESATPESSGSEVEFSHEYWMRHALTLAKRARDEREVPVGAVLVLNNRVIGEGWNRAIGLHDPTAHAEIMALRQGGLVMQNYRLIDATLYVTFEPCVMCAGAMIHSRIGRVVFGVRNAKTGAAGSLMDVLHYPGPEDNEQKQLFVEQHKHYLDEIIEQISEFSKRVILADANLDKVLSAYNKHRDKPIREQAENIIHLFTLTNLGAPAAFKYFDTTIDRKRYTSTKEVLDATLIHQSITGLYETRIDLSQLGGD

SEQ ID NO: 297 - protein, 1554 aa, synthetic construct
  REGION 1..1554: note = 121 Cas9 TadACP136ins 1052 polypeptide sequence
MDKKYSIGLAIGTNSVGWAVITDEYKVPSKKFKVLGNTDRHSIKKNLIGALLFDSGETAEATRLKRTARRRYTRRKNRICYLQEIFSNEMAKVDDSFFHRLEESFLVEEDKKHERHPIFGNIVDEVAYHEKYPTIYHLRKKLVDSTDKADLRLIYLALAHMIKFRGHFLIEGDLNPDNSDVDKLFIQLVQTYNQLFEENPINASGVDAKAILSARLSKSRRLENLIAQLPGEKKNGLFGNLIALSLGLTPNFKSNFDLAEDAKLQLSKDTYDDDLDNLLAQIGDQYADLFLAAKNLSDAILLSDILRVNTEITKAPLSASMIKRYDEHHQDLTLLKALVRQQLPEKYKEIFFDQSKNGYAGYIDGGASQEEFYKFIKPILEKMDGTEELLVKLNREDLLRKQRTFDNGSIPHQIHLGELHAILRRQEDFYPFLKDNREKIEKILTFRIPYYVGPLARGNSRFAWMTRKSEETITPWNFEEVVDKGASAQSFIERMTNFDKNLPNEKVLPKHSLLYEYFTVYNELTKVKYVTEGMRKPAFLSGEQKKAIVDLLFKTNRKVTVKQLKEDYFKKIECFDSVEISGVEDRFNASLGTYHDLLKIIKDKDFLDNEENEDILEDIVLTLTLFEDREMIEERLKTYAHLFDDKVMKQLKRRRYTGWGRLSRKLINGIRDKQSGKTILDFLKSDGFANRNFMQLIHDDSLTFKEDIQKAQVSGQGDSLHEHIANLAGSPAIKKGILQTVKVVDELVKVMGRHKPENIVIEMARENQTTQKGQKNSRERMKRIEEGIKELGSQILKEHPVENTQLQNEKLYLYYLQNGRDMYVDQELDINRLSDYDVDHIVPQSFLKDDSIDNKVLTRSDKNRGKSDNVPSEEVVKKMKNYWRQLLNAKLITQRKFDNLTKAERGGLSELDKAGFIKRQLVETRQITKHVAQILDSRMNTKYDENDKLIREVKVITLKSKLVSDFRKDFQFYKVREINNYHHAHDAYLNAVVGTALIKKYPKLESEFVYGDYKVYDVRKMIAKSEQEIGKATAKYFFYSNIMNFFKTEITLAMNHRVEITEGILADECAALLCYFFRMPRQVFNAQKKAQSSTDGSSGSETPGTSESATPESSGSEVEFSHEYWMRHALTLAKRARDEREVPVGAVLVLNNRVIGEGWNRAIGLHDPTAHAEIMALRQGGLVMQNYRLIDATLYVTFEPCVMCAGAMIHSRIGRVVFGVRNAKTGAAGSLMDVLHYPGNGEIRKRPLIETNGETGEIVWDKGRDFATVRKVLSMPQVNIVKKTEVQTGGFSKESILPKRNSDKLIARKKDWDPKKYGGFDSPTVAYSVLVVAKVEKGKSKKLKSVKELLGITIMERSSFEKNPIDFLEAKGYKEVKKDLIIKLPKYSLFELENGRKRMLASAGELQKGNELALPSKYVNFLYLASHYEKLKGSPEDNEQKQLFVEQHKHYLDEIIEQISEFSKRVILADANLDKVLSAYNKHRDKPIREQAENIIHLFTLTNLGAPAAFKYFDTTIDRKRYTSTKEVLDATLIHQSITGLYETRIDLSQLGGD

SEQ ID NO: 298 - protein, 1554 aa, synthetic construct
  REGION 1..1554: note = 122 Cas9 TadACP136ins 1041 polypeptide sequence
MDKKYSIGLAIGTNSVGWAVITDEYKVPSKKFKVLGNTDRHSIKKNLIGALLFDSGETAEATRLKRTARRRYTRRKNRICYLQEIFSNEMAKVDDSFFHRLEESFLVEEDKKHERHPIFGNIVDEVAYHEKYPTIYHLRKKLVDSTDKADLRLIYLALAHMIKFRGHFLIEGDLNPDNSDVDKLFIQLVQTYNQLFEENPINASGVDAKAILSARLSKSRRLENLIAQLPGEKKNGLFGNLIALSLGLTPNFKSNFDLAEDAKLQLSKDTYDDDLDNLLAQIGDQYADLFLAAKNLSDAILLSDILRVNTEITKAPLSASMIKRYDEHHQDLTLLKALVRQQLPEKYKEIFFDQSKNGYAGYIDGGASQEEFYKFIKPILEKMDGTEELLVKLNREDLLRKQRTFDNGSIPHQIHLGELHAILRRQEDFYPFLKDNREKIEKILTFRIPYYVGPLARGNSRFAWMTRKSEETITPWNFEEVVDKGASAQSFIERMTNFDKNLPNEKVLPKHSLLYEYFTVYNELTKVKYVTEGMRKPAFLSGEQKKAIVDLLFKTNRKVTVKQLKEDYFKKIECFDSVEISGVEDRFNASLGTYHDLLKIIKDKDFLDNEENEDILEDIVLTLTLFEDREMIEERLKTYAHLFDDKVMKQLKRRRYTGWGRLSRKLINGIRDKQSGKTILDFLKSDGFANRNFMQLIHDDSLTFKEDIQKAQVSGQGDSLHEHIANLAGSPAIKKGILQTVKVVDELVKVMGRHKPENIVIEMARENQTTQKGQKNSRERMKRIEEGIKELGSQILKEHPVENTQLQNEKLYLYYLQNGRDMYVDQELDINRLSDYDVDHIVPQSFLKDDSIDNKVLTRSDKNRGKSDNVPSEEVVKKMKNYWRQLLNAKLITQRKFDNLTKAERGGLSELDKAGFIKRQLVETRQITKHVAQILDSRMNTKYDENDKLIREVKVITLKSKLVSDFRKDFQFYKVREINNYHHAHDAYLNAVVGTALIKKYPKLESEFVYGDYKVYDVRKMIAKSEQEIGKATAKYFFYSMNHRVEITEGILADECAALLCYFFRMPRQVFNAQKKAQSSTDGSSGSETPGTSESATPESSGSEVEFSHEYWMRHALTLAKRARDEREVPVGAVLVLNNRVIGEGWNRAIGLHDPTAHAEIMALRQGGLVMQNYRLIDATLYVTFEPCVMCAGAMIHSRIGRVVFGVRNAKTGAAGSLMDVLHYPGNIMNFFKTEITLANGEIRKRPLIETNGETGEIVWDKGRDFATVRKVLSMPQVNIVKKTEVQTGGFSKESILPKRNSDKLIARKKDWDPKKYGGFDSPTVAYSVLVVAKVEKGKSKKLKSVKELLGITIMERSSFEKNPIDFLEAKGYKEVKKDLIIKLPKYSLFELENGRKRMLASAGELQKGNELALPSKYVNFLYLASHYEKLKGSPEDNEQKQLFVEQHKHYLDEIIEQISEFSKRVILADANLDKVLSAYNKHRDKPIREQAENIIHLFTLTNLGAPAAFKYFDTTIDRKRYTSTKEVLDATLIHQSITGLYETRIDLSQLGGD

SEQ ID NO: 299 - protein, 1554 aa, synthetic construct
  REGION 1..1554: note = 123 Cas9 TadACP139ins 1299 polypeptide sequence
MDKKYSIGLAIGTNSVGWAVITDEYKVPSKKFKVLGNTDRHSIKKNLIGALLFDSGETAEATRLKRTARRRYTRRKNRICYLQEIFSNEMAKVDDSFFHRLEESFLVEEDKKHERHPIFGNIVDEVAYHEKYPTIYHLRKKLVDSTDKADLRLIYLALAHMIKFRGHFLIEGDLNPDNSDVDKLFIQLVQTYNQLFEENPINASGVDAKAILSARLSKSRRLENLIAQLPGEKKNGLFGNLIALSLGLTPNFKSNFDLAEDAKLQLSKDTYDDDLDNLLAQIGDQYADLFLAAKNLSDAILLSDILRVNTEITKAPLSASMIKRYDEHHQDLTLLKALVRQQLPEKYKEIFFDQSKNGYAGYIDGGASQEEFYKFIKPILEKMDGTEELLVKLNREDLLRKQRTFDNGSIPHQIHLGELHAILRRQEDFYPFLKDNREKIEKILTFRIPYYVGPLARGNSRFAWMTRKSEETITPWNFEEVVDKGASAQSFIERMTNFDKNLPNEKVLPKHSLLYEYFTVYNELTKVKYVTEGMRKPAFLSGEQKKAIVDLLFKTNRKVTVKQLKEDYFKKIECFDSVEISGVEDRFNASLGTYHDLLKIIKDKDFLDNEENEDILEDIVLTLTLFEDREMIEERLKTYAHLFDDKVMKQLKRRRYTGWGRLSRKLINGIRDKQSGKTILDFLKSDGFANRNFMQLIHDDSLTFKEDIQKAQVSGQGDSLHEHIANLAGSPAIKKGILQTVKVVDELVKVMGRHKPENIVIEMARENQTTQKGQKNSRERMKRIEEGIKELGSQILKEHPVENTQLQNEKLYLYYLQNGRDMYVDQELDINRLSDYDVDHIVPQSFLKDDSIDNKVLTRSDKNRGKSDNVPSEEVVKKMKNYWRQLLNAKLITQRKFDNLTKAERGGLSELDKAGFIKRQLVETRQITKHVAQILDSRMNTKYDENDKLIREVKVITLKSKLVSDFRKDFQFYKVREINNYHHAHDAYLNAVVGTALIKKYPKLESEFVYGDYKVYDVRKMIAKSEQEIGKATAKYFFYSNIMNFFKTEITLANGEIRKRPLIETNGETGEIVWDKGRDFATVRKVLSMPQVNIVKKTEVQTGGFSKESILPKRNSDKLIARKKDWDPKKYGGFDSPTVAYSVLVVAKVEKGKSKKLKSVKELLGITIMERSSFEKNPIDFLEAKGYKEVKKDLIIKLPKYSLFELENGRKRMLASAGELQKGNELALPSKYVNFLYLASHYEKLKGSPEDNEQKQLFVEQHKHYLDEIIEQISEFSKRVILADANLDKVLSAYNKHRMNHRVEITEGILADECAALLCYFFRMPRQVFNAQKKAQSSTDGSSGSETPGTSESATPESSGSEVEFSHEYWMRHALTLAKRARDEREVPVGAVLVLNNRVIGEGWNRAIGLHDPTAHAEIMALRQGGLVMQNYRLIDATLYVTFEPCVMCAGAMIHSRIGRVVFGVRNAKTGAAGSLMDVLHYPGDKPIREQAENIIHLFTLTNLGAPAAFKYFDTTIDRKRYTSTKEVLDATLIHQSITGLYETRIDLSQLGGD

SEQ ID NO: 300 - protein, 1454 aa, synthetic construct
  REGION 1..1454: note = 124 Cas9 delta 792-872TadAins polypeptide sequence
MDKKYSIGLAIGTNSVGWAVITDEYKVPSKKFKVLGNTDRHSIKKNLIGALLFDSGETAEATRLKRTARRRYTRRKNRICYLQEIFSNEMAKVDDSFFHRLEESFLVEEDKKHERHPIFGNIVDEVAYHEKYPTIYHLRKKLVDSTDKADLRLIYLALAHMIKFRGHFLIEGDLNPDNSDVDKLFIQLVQTYNQLFEENPINASGVDAKAILSARLSKSRRLENLIAQLPGEKKNGLFGNLIALSLGLTPNFKSNFDLAEDAKLQLSKDTYDDDLDNLLAQIGDQYADLFLAAKNLSDAILLSDILRVNTEITKAPLSASMIKRYDEHHQDLTLLKALVRQQLPEKYKEIFFDQSKNGYAGYIDGGASQEEFYKFIKPILEKMDGTEELLVKLNREDLLRKQRTFDNGSIPHQIHLGELHAILRRQEDFYPFLKDNREKIEKILTFRIPYYVGPLARGNSRFAWMTRKSEETITPWNFEEVVDKGASAQSFIERMTNFDKNLPNEKVLPKHSLLYEYFTVYNELTKVKYVTEGMRKPAFLSGEQKKAIVDLLFKTNRKVTVKQLKEDYFKKIECFDSVEISGVEDRFNASLGTYHDLLKIIKDKDFLDNEENEDILEDIVLTLTLFEDREMIEERLKTYAHLFDDKVMKQLKRRRYTGWGRLSRKLINGIRDKQSGKTILDFLKSDGFANRNFMQLIHDDSLTFKEDIQKAQVSGQGDSLHEHIANLAGSPAIKKGILQTVKVVDELVKVMGRHKPENIVIEMARENQTTQKGQKNSRERMKRIEEGIKELGSEVEFSHEYWMRHALTLAKRARDEREVPVGAVLVLNNRVIGEGWNRAIGLHDPTAHAEIMALRQGGLVMQNYRLIDATLYVTFEPCVMCAGAMIHSRIGRVVFGVRNAKTGAAGSLMDVLHYPGMNHRVEITEGILADECAALLCYFFRMPRQVFNAQKKAQSSTDEEVVKKMKNYWRQLLNAKLITQRKFDNLTKAERGGLSELDKAGFIKRQLVETRQITKHVAQILDSRMNTKYDENDKLIREVKVITLKSKLVSDFRKDFQFYKVREINNYHHAHDAYLNAVVGTALIKKYPKLESEFVYGDYKVYDVRKMIAKSEQEIGKATAKYFFYSNIMNFFKTEITLANGEIRKRPLIETNGETGEIVWDKGRDFATVRKVLSMPQVNIVKKTEVQTGGFSKESILPKRNSDKLIARKKDWDPKKYGGFDSPTVAYSVLVVAKVEKGKSKKLKSVKELLGITIMERSSFEKNPIDFLEAKGYKEVKKDLIIKLPKYSLFELENGRKRMLASAGELQKGNELALPSKYVNFLYLASHYEKLKGSPEDNEQKQLFVEQHKHYLDEIIEQISEFSKRVILADANLDKVLSAYNKHRDKPIREQAENIIHLFTLTNLGAPAAFKYFDTTIDRKRYTSTKEVLDATLIHQSITGLYETRIDLSQLGGD

SEQ ID NO: 301 - protein, 1420 aa, synthetic construct
  REGION 1..1420: note = 125 Cas9 delta 792-906TadAins polypeptide sequence
MDKKYSIGLAIGTNSVGWAVITDEYKVPSKKFKVLGNTDRHSIKKNLIGALLFDSGETAEATRLKRTARRRYTRRKNRICYLQEIFSNEMAKVDDSFFHRLEESFLVEEDKKHERHPIFGNIVDEVAYHEKYPTIYHLRKKLVDSTDKADLRLIYLALAHMIKFRGHFLIEGDLNPDNSDVDKLFIQLVQTYNQLFEENPINASGVDAKAILSARLSKSRRLENLIAQLPGEKKNGLFGNLIALSLGLTPNFKSNFDLAEDAKLQLSKDTYDDDLDNLLAQIGDQYADLFLAAKNLSDAILLSDILRVNTEITKAPLSASMIKRYDEHHQDLTLLKALVRQQLPEKYKEIFFDQSKNGYAGYIDGGASQEEFYKFIKPILEKMDGTEELLVKLNREDLLRKQRTFDNGSIPHQIHLGELHAILRRQEDFYPFLKDNREKIEKILTFRIPYYVGPLARGNSRFAWMTRKSEETITPWNFEEVVDKGASAQSFIERMTNFDKNLPNEKVLPKHSLLYEYFTVYNELTKVKYVTEGMRKPAFLSGEQKKAIVDLLFKTNRKVTVKQLKEDYFKKIECFDSVEISGVEDRFNASLGTYHDLLKIIKDKDFLDNEENEDILEDIVLTLTLFEDREMIEERLKTYAHLFDDKVMKQLKRRRYTGWGRLSRKLINGIRDKQSGKTILDFLKSDGFANRNFMQLIHDDSLTFKEDIQKAQVSGQGDSLHEHIANLAGSPAIKKGILQTVKVVDELVKVMGRHKPENIVIEMARENQTTQKGQKNSRERMKRIEEGIKELGSEVEFSHEYWMRHALTLAKRARDEREVPVGAVLVLNNRVIGEGWNRAIGLHDPTAHAEIMALRQGGLVMQNYRLIDATLYVTFEPCVMCAGAMIHSRIGRVVFGVRNAKTGAAGSLMDVLHYPGMNHRVEITEGILADECAALLCYFFRMPRQVFNAQKKAQSSTDGLSELDKAGFIKRQLVETRQITKHVAQILDSRMNTKYDENDKLIREVKVITLKSKLVSDFRKDFQFYKVREINNYHHAHDAYLNAVVGTALIKKYPKLESEFVYGDYKVYDVRKMIAKSEQEIGKATAKYFFYSNIMNFFKTEITLANGEIRKRPLIETNGETGEIVWDKGRDFATVRKVLSMPQVNIVKKTEVQTGGFSKESILPKRNSDKLIARKKDWDPKKYGGFDSPTVAYSVLVVAKVEKGKSKKLKSVKELLGITIMERSSFEKNPIDFLEAKGYKEVKKDLIIKLPKYSLFELENGRKRMLASAGELQKGNELALPSKYVNFLYLASHYEKLKGSPEDNEQKQLFVEQHKHYLDEIIEQISEFSKRVILADANLDKVLSAYNKHRDKPIREQAENIIHLFTLTNLGAPAAFKYFDTTIDRKRYTSTKEVLDATLIHQSITGLYETRIDLSQLGGD

SEQ ID NO: 302 - protein, 1554 aa, synthetic construct
  REGION 1..1554: note = 126 TadA CP65ins 1003 polypeptide sequence
MDKKYSIGLAIGTNSVGWAVITDEYKVPSKKFKVLGNTDRHSIKKNLIGALLFDSGETAEATRLKRTARRRYTRRKNRICYLQEIFSNEMAKVDDSFFHRLEESFLVEEDKKHERHPIFGNIVDEVAYHEKYPTIYHLRKKLVDSTDKADLRLIYLALAHMIKFRGHFLIEGDLNPDNSDVDKLFIQLVQTYNQLFEENPINASGVDAKAILSARLSKSRRLENLIAQLPGEKKNGLFGNLIALSLGLTPNFKSNFDLAEDAKLQLSKDTYDDDLDNLLAQIGDQYADLFLAAKNLSDAILLSDILRVNTEITKAPLSASMIKRYDEHHQDLTLLKALVRQQLPEKYKEIFFDQSKNGYAGYIDGGASQEEFYKFIKPILEKMDGTEELLVKLNREDLLRKQRTFDNGSIPHQIHLGELHAILRRQEDFYPFLKDNREKIEKILTFRIPYYVGPLARGNSRFAWMTRKSEETITPWNFEEVVDKGASAQSFIERMTNFDKNLPNEKVLPKHSLLYEYFTVYNELTKVKYVTEGMRKPAFLSGEQKKAIVDLLFKTNRKVTVKQLKEDYFKKIECFDSVEISGVEDRFNASLGTYHDLLKIIKDKDFLDNEENEDILEDIVLTLTLFEDREMIEERLKTYAHLFDDKVMKQLKRRRYTGWGRLSRKLINGIRDKQSGKTILDFLKSDGFANRNFMQLIHDDSLTFKEDIQKAQVSGQGDSLHEHIANLAGSPAIKKGILQTVKVVDELVKVMGRHKPENIVIEMARENQTTQKGQKNSRERMKRIEEGIKELGSQILKEHPVENTQLQNEKLYLYYLQNGRDMYVDQELDINRLSDYDVDHIVPQSFLKDDSIDNKVLTRSDKNRGKSDNVPSEEVVKKMKNYWRQLLNAKLITQRKFDNLTKAERGGLSELDKAGFIKRQLVETRQITKHVAQILDSRMNTKYDENDKLIREVKVITLKSKLVSDFRKDFQFYKVREINNYHHAHDAYLNAVVGTALIKKYPKTAHAEIMALRQGGLVMQNYRLIDATLYVTFEPCVMCAGAMIHSRIGRVVFGVRNAKTGAAGSLMDVLHYPGMNHRVEITEGILADECAALLCYFFRMPRQVFNAQKKAQSSTDGSSGSETPGTSESATPESSGSEVEFSHEYWMRHALTLAKRARDEREVPVGAVLVLNNRVIGEGWNRAIGLHDPLESEFVYGDYKVYDVRKMIAKSEQEIGKATAKYFFYSNIMNFFKTEITLANGEIRKRPLIETNGETGEIVWDKGRDFATVRKVLSMPQVNIVKKTEVQTGGFSKESILPKRNSDKLIARKKDWDPKKYGGFDSPTVAYSVLVVAKVEKGKSKKLKSVKELLGITIMERSSFEKNPIDFLEAKGYKEVKKDLIIKLPKYSLFELENGRKRMLASAGELQKGNELALPSKYVNFLYLASHYEKLKGSPEDNEQKQLFVEQHKHYLDEIIEQISEFSKRVILADANLDKVLSAYNKHRDKPIREQAENIIHLFTLTNLGAPAAFKYFDTTIDRKRYTSTKEVLDATLIHQSITGLYETRIDLSQLGGD

SEQ ID NO: 303 - protein, 1554 aa, synthetic construct
  REGION 1..1554: note = 127 TadA CP65ins 1016 polypeptide sequence
MDKKYSIGLAIGTNSVGWAVITDEYKVPSKKFKVLGNTDRHSIKKNLIGALLFDSGETAEATRLKRTARRRYTRRKNRICYLQEIFSNEMAKVDDSFFHRLEESFLVEEDKKHERHPIFGNIVDEVAYHEKYPTIYHLRKKLVDSTDKADLRLIYLALAHMIKFRGHFLIEGDLNPDNSDVDKLFIQLVQTYNQLFEENPINASGVDAKAILSARLSKSRRLENLIAQLPGEKKNGLFGNLIALSLGLTPNFKSNFDLAEDAKLQLSKDTYDDDLDNLLAQIGDQYADLFLAAKNLSDAILLSDILRVNTEITKAPLSASMIKRYDEHHQDLTLLKALVRQQLPEKYKEIFFDQSKNGYAGYIDGGASQEEFYKFIKPILEKMDGTEELLVKLNREDLLRKQRTFDNGSIPHQIHLGELHAILRRQEDFYPFLKDNREKIEKILTFRIPYYVGPLARGNSRFAWMTRKSEETITPWNFEEVVDKGASAQSFIERMTNFDKNLPNEKVLPKHSLLYEYFTVYNELTKVKYVTEGMRKPAFLSGEQKKAIVDLLFKTNRKVTVKQLKEDYFKKIECFDSVEISGVEDRFNASLGTYHDLLKIIKDKDFLDNEENEDILEDIVLTLTLFEDREMIEERLKTYAHLFDDKVMKQLKRRRYTGWGRLSRKLINGIRDKQSGKTILDFLKSDGFANRNFMQLIHDDSLTFKEDIQKAQVSGQGDSLHEHIANLAGSPAIKKGILQTVKVVDELVKVMGRHKPENIVIEMARENQTTQKGQKNSRERMKRIEEGIKELGSQILKEHPVENTQLQNEKLYLYYLQNGRDMYVDQELDINRLSDYDVDHIVPQSFLKDDSIDNKVLTRSDKNRGKSDNVPSEEVVKKMKNYWRQLLNAKLITQRKFDNLTKAERGGLSELDKAGFIKRQLVETRQITKHVAQILDSRMNTKYDENDKLIREVKVITLKSKLVSDFRKDFQFYKVREINNYHHAHDAYLNAVVGTALIKKYPKLESEFVYGDYKVTAHAEIMALRQGGLVMQNYRLIDATLYVTFEPCVMCAGAMIHSRIGRVVFGVRNAKTGAAGSLMDVLHYPGMNHRVEITEGILADECAALLCYFFRMPRQVFNAQKKAQSSTDGSSGSETPGTSESATPESSGSEVEFSHEYWMRHALTLAKRARDEREVPVGAVLVLNNRVIGEGWNRAIGLHDPYDVRKMIAKSEQEIGKATAKYFFYSNIMNFFKTEITLANGEIRKRPLIETNGETGEIVWDKGRDFATVRKVLSMPQVNIVKKTEVQTGGFSKESILPKRNSDKLIARKKDWDPKKYGGFDSPTVAYSVLVVAKVEKGKSKKLKSVKELLGITIMERSSFEKNPIDFLEAKGYKEVKKDLIIKLPKYSLFELENGRKRMLASAGELQKGNELALPSKYVNFLYLASHYEKLKGSPEDNEQKQLFVEQHKHYLDEIIEQISEFSKRVILADANLDKVLSAYNKHRDKPIREQAENIIHLFTLTNLGAPAAFKYFDTTIDRKRYTSTKEVLDATLIHQSITGLYETRIDLSQLGGD

SEQ ID NO: 304 - protein, 1554 aa, synthetic construct
  REGION 1..1554: note = 128 TadA CP65ins 1022 polypeptide sequence
MDKKYSIGLAIGTNSVGWAVITDEYKVPSKKFKVLGNTDRHSIKKNLIGALLFDSGETAEATRLKRTARRRYTRRKNRICYLQEIFSNEMAKVDDSFFHRLEESFLVEEDKKHERHPIFGNIVDEVAYHEKYPTIYHLRKKLVDSTDKADLRLIYLALAHMIKFRGHFLIEGDLNPDNSDVDKLFIQLVQTYNQLFEENPINASGVDAKAILSARLSKSRRLENLIAQLPGEKKNGLFGNLIALSLGLTPNFKSNFDLAEDAKLQLSKDTYDDDLDNLLAQIGDQYADLFLAAKNLSDAILLSDILRVNTEITKAPLSASMIKRYDEHHQDLTLLKALVRQQLPEKYKEIFFDQSKNGYAGYIDGGASQEEFYKFIKPILEKMDGTEELLVKLNREDLLRKQRTFDNGSIPHQIHLGELHAILRRQEDFYPFLKDNREKIEKILTFRIPYYVGPLARGNSRFAWMTRKSEETITPWNFEEVVDKGASAQSFIERMTNFDKNLPNEKVLPKHSLLYEYFTVYNELTKVKYVTEGMRKPAFLSGEQKKAIVDLLFKTNRKVTVKQLKEDYFKKIECFDSVEISGVEDRFNASLGTYHDLLKIIKDKDFLDNEENEDILEDIVLTLTLFEDREMIEERLKTYAHLFDDKVMKQLKRRRYTGWGRLSRKLINGIRDKQSGKTILDFLKSDGFANRNFMQLIHDDSLTFKEDIQKAQVSGQGDSLHEHIANLAGSPAIKKGILQTVKVVDELVKVMGRHKPENIVIEMARENQTTQKGQKNSRERMKRIEEGIKELGSQILKEHPVENTQLQNEKLYLYYLQNGRDMYVDQELDINRLSDYDVDHIVPQSFLKDDSIDNKVLTRSDKNRGKSDNVPSEEVVKKMKNYWRQLLNAKLITQRKFDNLTKAERGGLSELDKAGFIKRQLVETRQITKHVAQILDSRMNTKYDENDKLIREVKVITLKSKLVSDFRKDFQFYKVREINNYHHAHDAYLNAVVGTALIKKYPKLESEFVYGDYKVYDVRKMITAHAEIMALRQGGLVMQNYRLIDATLYVTFEPCVMCAGAMIHSRIGRVVFGVRNAKTGAAGSLMDVLHYPGMNHRVEITEGILADECAALLCYFFRMPRQVFNAQKKAQSSTDGSSGSETPGTSESATPESSGSEVEFSHEYWMRHALTLAKRARDEREVPVGAVLVLNNRVIGEGWNRAIGLHDPAKSEQEIGKATAKYFFYSNIMNFFKTEITLANGEIRKRPLIETNGETGEIVWDKGRDFATVRKVLSMPQVNIVKKTEVQTGGFSKESILPKRNSDKLIARKKDWDPKKYGGFDSPTVAYSVLVVAKVEKGKSKKLKSVKELLGITIMERSSFEKNPIDFLEAKGYKEVKKDLIIKLPKYSLFELENGRKRMLASAGELQKGNELALPSKYVNFLYLASHYEKLKGSPEDNEQKQLFVEQHKHYLDEIIEQISEFSKRVILADANLDKVLSAYNKHRDKPIREQAENIIHLFTLTNLGAPAAFKYFDTTIDRKRYTSTKEVLDATLIHQSITGLYETRIDLSQLGGD

SEQ ID NO: 305 - protein, 1554 aa, synthetic construct
  REGION 1..1554: note = 129 TadA CP65ins 1029 polypeptide sequence
MDKKYSIGLAIGTNSVGWAVITDEYKVPSKKFKVLGNTDRHSIKKNLIGALLFDSGETAEATRLKRTARRRYTRRKNRICYLQEIFSNEMAKVDDSFFHRLEESFLVEEDKKHERHPIFGNIVDEVAYHEKYPTIYHLRKKLVDSTDKADLRLIYLALAHMIKFRGHFLIEGDLNPDNSDVDKLFIQLVQTYNQLFEENPINASGVDAKAILSARLSKSRRLENLIAQLPGEKKNGLFGNLIALSLGLTPNFKSNFDLAEDAKLQLSKDTYDDDLDNLLAQIGDQYADLFLAAKNLSDAILLSDILRVNTEITKAPLSASMIKRYDEHHQDLTLLKALVRQQLPEKYKEIFFDQSKNGYAGYIDGGASQEEFYKFIKPILEKMDGTEELLVKLNREDLLRKQRTFDNGSIPHQIHLGELHAILRRQEDFYPFLKDNREKIEKILTFRIPYYVGPLARGNSRFAWMTRKSEETITPWNFEEVVDKGASAQSFIERMTNFDKNLPNEKVLPKHSLLYEYFTVYNELTKVKYVTEGMRKPAFLSGEQKKAIVDLLFKTNRKVTVKQLKEDYFKKIECFDSVEISGVEDRFNASLGTYHDLLKIIKDKDFLDNEENEDILEDIVLTLTLFEDREMIEERLKTYAHLFDDKVMKQLKRRRYTGWGRLSRKLINGIRDKQSGKTILDFLKSDGFANRNFMQLIHDDSLTFKEDIQKAQVSGQGDSLHEHIANLAGSPAIKKGILQTVKVVDELVKVMGRHKPENIVIEMARENQTTQKGQKNSRERMKRIEEGIKELGSQILKEHPVENTQLQNEKLYLYYLQNGRDMYVDQELDINRLSDYDVDHIVPQSFLKDDSIDNKVLTRSDKNRGKSDNVPSEEVVKKMKNYWRQLLNAKLITQRKFDNLTKAERGGLSELDKAGFIKRQLVETRQITKHVAQILDSRMNTKYDENDKLIREVKVITLKSKLVSDFRKDFQFYKVREINNYHHAHDAYLNAVVGTALIKKYPKLESEFVYGDYKVYDVRKMIAKSEQEITAHAEIMALRQGGLVMQNYRLIDATLYVTFEPCVMCAGAMIHSRIGRVVFGVRNAKTGAAGSLMDVLHYPGMNHRVEITEGILADECAALLCYFFRMPRQVFNAQKKAQSSTDGSSGSETPGTSESATPESSGSEVEFSHEYWMRHALTLAKRARDEREVPVGAVLVLNNRVIGEGWNRAIGLHDPGKATAKYFFYSNIMNFFKTEITLANGEIRKRPLIETNGETGEIVWDKGRDFATVRKVLSMPQVNIVKKTEVQTGGFSKESILPKRNSDKLIARKKDWDPKKYGGFDSPTVAYSVLVVAKVEKGKSKKLKSVKELLGITIMERSSFEKNPIDFLEAKGYKEVKKDLIIKLPKYSLFELENGRKRMLASAGELQKGNELALPSKYVNFLYLASHYEKLKGSPEDNEQKQLFVEQHKHYLDEIIEQISEFSKRVILADANLDKVLSAYNKHRDKPIREQAENIIHLFTLTNLGAPAAFKYFDTTIDRKRYTSTKEVLDATLIHQSITGLYETRIDLSQLGGD

SEQ ID NO: 306 - protein, 1554 aa, synthetic construct
  REGION 1..1554: note = 130 TadA CP65ins 1041 polypeptide sequence
MDKKYSIGLAIGTNSVGWAVITDEYKVPSKKFKVLGNTDRHSIKKNLIGALLFDSGETAEATRLKRTARRRYTRRKNRICYLQEIFSNEMAKVDDSFFHRLEESFLVEEDKKHERHPIFGNIVDEVAYHEKYPTIYHLRKKLVDSTDKADLRLIYLALAHMIKFRGHFLIEGDLNPDNSDVDKLFIQLVQTYNQLFEENPINASGVDAKAILSARLSKSRRLENLIAQLPGEKKNGLFGNLIALSLGLTPNFKSNFDLAEDAKLQLSKDTYDDDLDNLLAQIGDQYADLFLAAKNLSDAILLSDILRVNTEITKAPLSASMIKRYDEHHQDLTLLKALVRQQLPEKYKEIFFDQSKNGYAGYIDGGASQEEFYKFIKPILEKMDGTEELLVKLNREDLLRKQRTFDNGSIPHQIHLGELHAILRRQEDFYPFLKDNREKIEKILTFRIPYYVGPLARGNSRFAWMTRKSEETITPWNFEEVVDKGASAQSFIERMTNFDKNLPNEKVLPKHSLLYEYFTVYNELTKVKYVTEGMRKPAFLSGEQKKAIVDLLFKTNRKVTVKQLKEDYFKKIECFDSVEISGVEDRFNASLGTYHDLLKIIKDKDFLDNEENEDILEDIVLTLTLFEDREMIEERLKTYAHLFDDKVMKQLKRRRYTGWGRLSRKLINGIRDKQSGKTILDFLKSDGFANRNFMQLIHDDSLTFKEDIQKAQVSGQGDSLHEHIANLAGSPAIKKGILQTVKVVDELVKVMGRHKPENIVIEMARENQTTQKGQKNSRERMKRIEEGIKELGSQILKEHPVENTQLQNEKLYLYYLQNGRDMYVDQELDINRLSDYDVDHIVPQSFLKDDSIDNKVLTRSDKNRGKSDNVPSEEVVKKMKNYWRQLLNAKLITQRKFDNLTKAERGGLSELDKAGFIKRQLVETRQITKHVAQILDSRMNTKYDENDKLIREVKVITLKSKLVSDFRKDFQFYKVREINNYHHAHDAYLNAVVGTALIKKYPKLESEFVYGDYKVYDVRKMIAKSEQEIGKATAKYFFYSTAHAEIMALRQGGLVMQNYRLIDATLYVTFEPCVMCAGAMIHSRIGRVVFGVRNAKTGAAGSLMDVLHYPGMNHRVEITEGILADECAALLCYFFRMPRQVFNAQKKAQSSTDGSSGSETPGTSESATPESSGSEVEFSHEYWMRHALTLAKRARDEREVPVGAVLVLNNRVIGEGWNRAIGLHDPNIMNFFKTEITLANGEIRKRPLIETNGETGEIVWDKGRDFATVRKVLSMPQVNIVKKTEVQTGGFSKESILPKRNSDKLIARKKDWDPKKYGGFDSPTVAYSVLVVAKVEKGKSKKLKSVKELLGITIMERSSFEKNPIDFLEAKGYKEVKKDLIIKLPKYSLFELENGRKRMLASAGELQKGNELALPSKYVNFLYLASHYEKLKGSPEDNEQKQLFVEQHKHYLDEIIEQISEFSKRVILADANLDKVLSAYNKHRDKPIREQAENIIHLFTLTNLGAPAAFKYFDTTIDRKRYTSTKEVLDATLIHQSITGLYETRIDLSQLGGD

SEQ ID NO: 307 - protein, 1554 aa, synthetic construct
  REGION 1..1554: note = 131 TadA CP65ins 1054 polypeptide sequence
MDKKYSIGLAIGTNSVGWAVITDEYKVPSKKFKVLGNTDRHSIKKNLIGALLFDSGETAEATRLKRTARRRYTRRKNRICYLQEIFSNEMAKVDDSFFHRLEESFLVEEDKKHERHPIFGNIVDEVAYHEKYPTIYHLRKKLVDSTDKADLRLIYLALAHMIKFRGHFLIEGDLNPDNSDVDKLFIQLVQTYNQLFEENPINASGVDAKAILSARLSKSRRLENLIAQLPGEKKNGLFGNLIALSLGLTPNFKSNFDLAEDAKLQLSKDTYDDDLDNLLAQIGDQYADLFLAAKNLSDAILLSDILRVNTEITKAPLSASMIKRYDEHHQDLTLLKALVRQQLPEKYKEIFFDQSKNGYAGYIDGGASQEEFYKFIKPILEKMDGTEELLVKLNREDLLRKQRTFDNGSIPHQIHLGELHAILRRQEDFYPFLKDNREKIEKILTFRIPYYVGPLARGNSRFAWMTRKSEETITPWNFEEVVDKGASAQSFIERMTNFDKNLPNEKVLPKHSLLYEYFTVYNELTKVKYVTEGMRKPAFLSGEQKKAIVDLLFKTNRKVTVKQLKEDYFKKIECFDSVEISGVEDRFNASLGTYHDLLKIIKDKDFLDNEENEDILEDIVLTLTLFEDREMIEERLKTYAHLFDDKVMKQLKRRRYTGWGRLSRKLINGIRDKQSGKTILDFLKSDGFANRNFMQLIHDDSLTFKEDIQKAQVSGQGDSLHEHIANLAGSPAIKKGILQTVKVVDELVKVMGRHKPENIVIEMARENQTTQKGQKNSRERMKRIEEGIKELGSQILKEHPVENTQLQNEKLYLYYLQNGRDMYVDQELDINRLSDYDVDHIVPQSFLKDDSIDNKVLTRSDKNRGKSDNVPSEEVVKKMKNYWRQLLNAKLITQRKFDNLTKAERGGLSELDKAGFIKRQLVETRQITKHVAQILDSRMNTKYDENDKLIREVKVITLKSKLVSDFRKDFQFYKVREINNYHHAHDAYLNAVVGTALIKKYPKLESEFVYGDYKVYDVRKMIAKSEQEIGKATAKYFFYSNIMNFFKTEITLANTAHAEIMALRQGGLVMQNYRLIDATLYVTFEPCVMCAGAMIHSRIGRVVFGVRNAKTGAAGSLMDVLHYPGMNHRVEITEGILADECAALLCYFFRMPRQVFNAQKKAQSSTDGSSGSETPGTSESATPESSGSEVEFSHEYWMRHALTLAKRARDEREVPVGAVLVLNNRVIGEGWNRAIGLHDPGEIRKRPLIETNGETGEIVWDKGRDFATVRKVLSMPQVNIVKKTEVQTGGFSKESILPKRNSDKLIARKKDWDPKKYGGFDSPTVAYSVLVVAKVEKGKSKKLKSVKELLGITIMERSSFEKNPIDFLEAKGYKEVKKDLIIKLPKYSLFELENGRKRMLASAGELQKGNELALPSKYVNFLYLASHYEKLKGSPEDNEQKQLFVEQHKHYLDEIIEQISEFSKRVILADANLDKVLSAYNKHRDKPIREQAENIIHLFTLTNLGAPAAFKYFDTTIDRKRYTSTKEVLDATLIHQSITGLYETRIDLSQLGGD

SEQ ID NO: 308 - protein, 1554 aa, synthetic construct
  REGION 1..1554: note = 132 TadA CP65ins 1246 polypeptide sequence
MDKKYSIGLAIGTNSVGWAVITDEYKVPSKKFKVLGNTDRHSIKKNLIGALLFDSGETAEATRLKRTARRRYTRRKNRICYLQEIFSNEMAKVDDSFFHRLEESFLVEEDKKHERHPIFGNIVDEVAYHEKYPTIYHLRKKLVDSTDKADLRLIYLALAHMIKFRGHFLIEGDLNPDNSDVDKLFIQLVQTYNQLFEENPINASGVDAKAILSARLSKSRRLENLIAQLPGEKKNGLFGNLIALSLGLTPNFKSNFDLAEDAKLQLSKDTYDDDLDNLLAQIGDQYADLFLAAKNLSDAILLSDILRVNTEITKAPLSASMIKRYDEHHQDLTLLKALVRQQLPEKYKEIFFDQSKNGYAGYIDGGASQEEFYKFIKPILEKMDGTEELLVKLNREDLLRKQRTFDNGSIPHQIHLGELHAILRRQEDFYPFLKDNREKIEKILTFRIPYYVGPLARGNSRFAWMTRKSEETITPWNFEEVVDKGASAQSFIERMTNFDKNLPNEKVLPKHSLLYEYFTVYNELTKVKYVTEGMRKPAFLSGEQKKAIVDLLFKTNRKVTVKQLKEDYFKKIECFDSVEISGVEDRFNASLGTYHDLLKIIKDKDFLDNEENEDILEDIVLTLTLFEDREMIEERLKTYAHLFDDKVMKQLKRRRYTGWGRLSRKLINGIRDKQSGKTILDFLKSDGFANRNFMQLIHDDSLTFKEDIQKAQVSGQGDSLHEHIANLAGSPAIKKGILQTVKVVDELVKVMGRHKPENIVIEMARENQTTQKGQKNSRERMKRIEEGIKELGSQILKEHPVENTQLQNEKLYLYYLQNGRDMYVDQELDINRLSDYDVDHIVPQSFLKDDSIDNKVLTRSDKNRGKSDNVPSEEVVKKMKNYWRQLLNAKLITQRKFDNLTKAERGGLSELDKAGFIKRQLVETRQITKHVAQILDSRMNTKYDENDKLIREVKVITLKSKLVSDFRKDFQFYKVREINNYHHAHDAYLNAVVGTALIKKYPKLESEFVYGDYKVYDVRKMIAKSEQEIGKATAKYFFYSNIMNFFKTEITLANGEIRKRPLIETNGETGEIVWDKGRDFATVRKVLSMPQVNIVKKTEVQTGGFSKESILPKRNSDKLIARKKDWDPKKYGGFDSPTVAYSVLVVAKVEKGKSKKLKSVKELLGITIMERSSFEKNPIDFLEAKGYKEVKKDLIIKLPKYSLFELENGRKRMLASAGELQKGNELALPSKYVNFLYLASHYEKLKGTAHAEIMALRQGGLVMQNYRLIDATLYVTFEPCVMCAGAMIHSRIGRVVFGVRNAKTGAAGSLMDVLHYPGMNHRVEITEGILADECAALLCYFFRMPRQVFNAQKKAQSSTDGSSGSETPGTSESATPESSGSEVEFSHEYWMRHALTLAKRARDEREVPVGAVLVLNNRVIGEGWNRAIGLHDPSPEDNEQKQLFVEQHKHYLDEIIEQISEFSKRVILADANLDKVLSAYNKHRDKPIREQAENIIHLFTLTNLGAPAAFKYFDTTIDRKRYTSTKEVLDATLIHQSITGLYETRIDLSQLGGD

SEQ ID NO: 309 - protein, 160 aa, Staphylococcus aureus
  REGION 1..160: note = MISC_FEATURE - TadA polypeptide sequence
MGSHMTNDIYFMTLAIEEAKKAAQLGEVPIGAIITKDDEVIARAHNLRETLQQPTAHAEHIAIERAAKVLGSWRLEGCTLYVTLEPCVMCAGTIVMSRIPRVVYGADDPKGGCSGSLMNLLQQSNFNHRAIVDKGVLKEACSTLLTTFFKNLRANKKSTN

SEQ ID NO: 310 - protein, 161 aa, Bacillus subtilis
  REGION 1..161: note = MISC_FEATURE - TadA polypeptide sequence
MTQDELYMKEAIKEAKKAEEKGEVPIGAVLVINGEIIARAHNLRETEQRSIAHAEMLVIDEACKALGTWRLEGATLYVTLEPCPMCAGAVVLSRVEKVVFGAFDPKGGCSGTLMNLLQEERFNHQAEVVSGVLEEECGGMLSAFFRELRKKKKAARKNLSE

SEQ ID NO: 311 - protein, 183 aa, Salmonella enterica
  REGION 1..183: note = MISC_FEATURE - TadA polypeptide sequence
  source 1..183: note = serovar Typhimurium
MPPAFITGVTSLSDVELDHEYWMRHALTLAKRAWDEREVPVGAVLVHNHRVIGEGWNRPIGRHDPTAHAEIMALRQGGLVLQNYRLLDTTLYVTLEPCVMCAGAMVHSRIGRVVFGARDAKTGAAGSLIDVLHHPGMNHRVEIIEGVLRDECATLLSDFFRMRRQEIKALKKADRAEGAGPAV

SEQ ID NO: 312 - protein, 164 aa, Shewanella putrefaciens
  REGION 1..164: note = MISC_FEATURE - TadA polypeptide sequence
MDEYWMQVAMQMAEKAEAAGEVPVGAVLVKDGQQIATGYNLSISQHDPTAHAEILCLRSAGKKLENYRLLDATLYITLEPCAMCAGAMVHSRIARVVYGARDEKTGAAGTVVNLLQHPAFNHQVEVTSGVLAEACSAQLSRFFKRRRDEKKALKLAQRAQQGIE

SEQ ID NO: 313 - protein, 173 aa, Haemophilus influenzae
  REGION 1..173: note = MISC_FEATURE - TadA polypeptide sequence
MDAAKVRSEFDEKMMRYALELADKAEALGEIPVGAVLVDDARNIIGEGWNLSIVQSDPTAHAEIIALRNGAKNIQNYRLLNSTLYVTLEPCTMCAGAILHSRIKRLVFGASDYKTGAIGSRFHFFDDYKMNHTLEITSGVLAEECSQKLSTFFQKRREEKKIEKALLKSLSDK

SEQ ID NO: 314 - protein, 161 aa, Caulobacter vibrioides
  REGION 1..161: note = MISC_FEATURE - TadA polypeptide sequence
MRTDESEDQDHRMMRLALDAARAAAEAGETPVGAVILDPSTGEVIATAGNGPIAAHDPTAHAEIAAMRAAAAKLGNYRLTDLTLVVTLEPCAMCAGAISHARIGRVVFGADDPKGGAVVHGPKFFAQPTCHWRPEVTGGVLADESADLLRGFFRARRKAKI

SEQ ID NO: 315 - protein, 179 aa, Geobacter sulfurreducens
  REGION 1..179: note = MISC_FEATURE - TadA polypeptide sequence
MSSLKKTPIRDDAYWMGKAIREAAKAAARDEVPIGAVIVRDGAVIGRGHNLREGSNDPSAHAEMIAIRQAARRSANWRLTGATLYVTLEPCLMCMGAIILARLERVVFGCYDPKGGAAGSLYDLSADPRLNHQVRLSPGVCQEECGTMLSDFFRDLRRRKKAKATPALFIDERKVPPEP

SEQ ID NO: 316 - protein, 167 aa, synthetic construct
  REGION 1..167: note = TadA*8 polypeptide sequence
MSEVEFSHEYWMRHALTLAKRARDEREVPVGAVLVLNNRVIGEGWNRAIGLHDPTAHAEIMALRQGGLVMQNYRLIDATLYVTFEPCVMCAGAMIHSRIGRVVFGVRNAKTGAAGSLMDVLHYPGMNHRVEITEGILADECAALLCTFFRMPRQVFNAQKKAQSSTD

SEQ ID NO: 317 - RNA, 80 nt, synthetic construct
  misc_feature 1..80: note = gRNA scaffold polynucleotide sequence
  source 1..80: mol_type = other RNA
gttttagagctagaaatagcaagttaaaataaggctagtccgttatcaacttgaaaaagtggcaccgagtcggtgctttt

SEQ ID NO: 318 - RNA, 125 nt, synthetic construct
  misc_feature 1..125: note = gRNA scaffold polynucleotide sequence
  source 1..125: mol_type = other RNA
gtttttgtactctcaagatttaagtaactgtacaacgaaacttacacagttacttaaatcttgcagaagctacaaagataaggcttcatgccgaaatcaacaccctgtcattttatggcagggtg

SEQ ID NO: 319 - RNA, 76 nt, Streptococcus pyogenes
  misc_feature 1..76: note = S. pyogenes gRNA scaffold oligonucleotide sequence
  source 1..76: mol_type = other RNA
gttttagagctagaaatagcaagttaaaataaggctagtccgttatcaacttgaaaaagtggcaccgagtcggtgc

SEQ ID NO: 320 - RNA, 84 nt, Staphylococcus aureus
  misc_feature 1..84: note = S. aureus gRNA scaffold oligonucleotide sequence
  source 1..84: mol_type = other RNA
gttttagtactctgtaatgaaaattacagaatctactaaaacaaggcaaaatgccgtgtttatctcgtcaacttgttggcgaga

SEQ ID NO: 321 - RNA, 97 nt, Bacillus hisashii
  misc_feature 1..97: note = BhCas12b gRNA scaffold oligonucleotide sequence
  source 1..97: mol_type = other RNA
gttctgtcttttggtcaggacaaccgtctagctataagtgctgcagggtgtgagaaactcctattgctggacgatgtctcttacgaggcattagcac

SEQ ID NO: 322 - RNA, 88 nt, Bacillus sp.
  misc_feature 1..88: note = BvCas12b gRNA scaffold oligonucleotide sequence
  source 1..88: mol_type = other RNA
gacctatagggtcaatgaatctgtgcgtgtgccataagtaattaaaaattacccaccacaggagcacctgaaaacaggtgcttggcac

SEQ ID NO: 323 - RNA, 80 nt, synthetic construct
  misc_feature 1..80: note = gRNA scaffold nucleotide sequence; oligonucleotide sequence
  modified_base 78..80: mod_base = um
  misc_feature 78..80: note = In embodiments, a nucleotide(s) is linked to the preceding 5' nucleotide by a 3' phosphorothioate internucleotide linkage
  source 1..80: mol_type = other RNA
gttttagagctagaaatagcaagttaaaataaggctagtccgttatcaacttgaaaaagtgggaccgagtcggtgctttt

SEQ ID NO: 324 - RNA, 80 nt, synthetic construct; identical to SEQ ID NO: 317
  misc_feature 1..80: note = gRNA scaffold nucleotide sequence
  misc_feature 78..80: note = In embodiments, a nucleotide(s) is linked to the preceding 5' nucleotide by a 3' phosphorothioate internucleotide linkage
  modified_base 78..80: mod_base = um
  source 1..80: mol_type = other RNA

SEQ ID NO: 325 - RNA, 117 nt, Bacillus hisashii
  misc_feature 1..117: note = BhCas12b gRNA scaffold + guide sequence; oligonucleotide sequence
  misc_feature 1..97: note = BhCas12b sgRNA scaffold
  source 1..117: mol_type = other RNA
gttctgtcttttggtcaggacaaccgtctagctataagtgctgcagggtgtgagaaactcctattgctggacgatgtctcttacgaggcattagcacnnnnnnnnnnnnnnnnnnnn

SEQ ID NO: 326 - RNA, 108 nt, Bacillus sp.
  misc_feature 1..108: note = BvCas12b gRNA scaffold + guide sequence; oligonucleotide sequence
  misc_feature 1..88: note = BvCas12b gRNA scaffold
  source 1..108: mol_type = other RNA
gacctatagggtcaatgaatctgtgcgtgtgccataagtaattaaaaattacccaccacaggagcacctgaaaacaggtgcttggcacnnnnnnnnnnnnnnnnnnnn

SEQ ID NO: 327 - RNA, 119 nt, Alicyclobacillus acidiphilus
  misc_feature 1..119: note = AaCas12b gRNA scaffold + guide sequence; oligonucleotide sequence
  misc_feature 1..99: note = AaCas12b gRNA scaffold
  source 1..119: mol_type = other RNA
gtctaaaggacagaatttttcaacgggtgtgccaatggccactttccaggtggcaaagcccgttgaacttctcaaaaagaacgatctgagaagtggcacnnnnnnnnnnnnnnnnnnnn

SEQ ID NO: 328 - protein, 29 aa, synthetic construct
  REGION 1..29: note = synthetic polypeptide sequence
PKKKRKVEGADKRTADGSEFESPKKKRKV

SEQ ID NO: 329 - protein, 23 aa, synthetic construct
  REGION 1..23: note = synthetic peptide sequence
RKSGKIAAIVVKRPRKPKKKRKV

SEQ ID NO: 330 - protein, 8 aa, synthetic construct
  REGION 1..8: note = synthetic peptide sequence
SGGSSGGS

SEQ ID NO: 331 - protein, 1609 aa, synthetic construct
  REGION 1..1609: note = pNMG-B335ABE8.1_Y147T_CP5_NGC PAM_monomer polypeptide sequence
MSEVEFSHEYWMRHALTLAKRARDEREVPVGAVLVLNNRVIGEGWNRAIGLHDPTAHAEIMALRQGGLVMQNYRLIDATLYVTFEPCVMCAGAMIHSRIGRVVFGVRNAKTGAAGSLMDVLHYPGMNHRVEITEGILADECAALLCTFFRMPRQVFNAQKKAQSSTDSGGSSGGSSGSETPGTSESATPESSGGSSGGSEIGKATAKYFFYSNIMNFFKTEITLANGEIRKRPLIETNGETGEIVWDKGRDFATVRKVLSMPQVNIVKKTEVQTGGFSKESILPKRNSDKLIARKKDWDPKKYGGFMQPTVAYSVLVVAKVEKGKSKKLKSVKELLGITIMERSSFEKNPIDFLEAKGYKEVKKDLIIKLPKYSLFELENGRKRMLASAKFLQKGNELALPSKYVNFLYLASHYEKLKGSPEDNEQKQLFVEQHKHYLDEIIEQISEFSKRVILADANLDKVLSAYNKHRDKPIREQAENIIHLFTLTNLGAPRAFKYFDTTIARKEYRSTKEVLDATLIHQSITGLYETRIDLSQLGGDGGSGGSGGSGGSGGSGGSGGMDKKYSIGLAIGTNSVGWAVITDEYKVPSKKFKVLGNTDRHSIKKNLIGALLFDSGETAEATRLKRTARRRYTRRKNRICYLQEIFSNEMAKVDDSFFHRLEESFLVEEDKKHERHPIFGNIVDEVAYHEKYPTIYHLRKKLVDSTDKADLRLIYLALAHMIKFRGHFLIEGDLNPDNSDVDKLFIQLVQTYNQLFEENPINASGVDAKAILSARLSKSRRLENLIAQLPGEKKNGLFGNLIALSLGLTPNFKSNFDLAEDAKLQLSKDTYDDDLDNLLAQIGDQYADLFLAAKNLSDAILLSDILRVNTEITKAPLSASMIKRYDEHHQDLTLLKALVRQQLPEKYKEIFFDQSKNGYAGYIDGGASQEEFYKFIKPILEKMDGTEELLVKLNREDLLRKQRTFDNGSIPHQIHLGELHAILRRQEDFYPFLKDNREKIEKILTFRIPYYVGPLARGNSRFAWMTRKSEETITPWNFEEVVDKGASAQSFIERMTNFDKNLPNEKVLPKHSLLYEYFTVYNELTKVKYVTEGMRKPAFLSGEQKKAIVDLLFKTNRKVTVKQLKEDYFKKIECFDSVEISGVEDRFNASLGTYHDLLKIIKDKDFLDNEENEDILEDIVLTLTLFEDREMIEERLKTYAHLFDDKVMKQLKRRRYTGWGRLSRKLINGIRDKQSGKTILDFLKSDGFANRNFMQLIHDDSLTFKEDIQKAQVSGQGDSLHEHIANLAGSPAIKKGILQTVKVVDELVKVMGRHKPENIVIEMARENQTTQKGQKNSRERMKRIEEGIKELGSQILKEHPVENTQLQNEKLYLYYLQNGRDMYVDQELDINRLSDYDVDHIVPQSFLKDDSIDNKVLTRSDKNRGKSDNVPSEEVVKKMKNYWRQLLNAKLITQRKFDNLTKAERGGLSELDKAGFIKRQLVETRQITKHVAQILDSRMNTKYDENDKLIREVKVITLKSKLVSDFRKDFQFYKVREINNYHHAHDAYLNAVVGTALIKKYPKLESEFVYGDYKVYDVRKMIAKSEQEGADKRTADGSEFESPKKKRKV

SEQ ID NO: 332 - protein, 1807 aa, synthetic construct
  REGION 1..1807: note = pNMG-357_ABE8.14 with NGC PAMCP5 polypeptide sequence
  REGION 1..174: note = MISC_FEATURE - Adenosine deaminase sequence
  REGION 175..198: note = MISC_FEATURE - Linker sequence
  REGION 199..365: note = MISC_FEATURE - Adenosine deaminase sequence
  REGION 366..397: note = MISC_FEATURE - Linker sequence
  REGION 398..738: note = MISC_FEATURE - Sequence derived from Cas9
  REGION 739..759: note = MISC_FEATURE - Linker sequence
  REGION 760..1785: note = MISC_FEATURE - Sequence derived from Cas9
  REGION 1786..1807: note = MISC_FEATURE - Bipartite nuclear localization sequence
MSEVEFSHEYWMRHALTLAKRAWDEREVPVGAVLVHNNRVIGEGWNRPIGRHDPTAHAEIMALRQGGLVMQNYRLIDATLYVTLEPCVMCAGAMIHSRIGRVVFGARDAKTGAAGSLMDVLHHPGMNHRVEITEGILADECAALLSDFFRMRRQEIKAQKKAQSSTDGGSSGGSSGSETPGTSESATPESSGGSSGGSMSEVEFSHEYWMRHALTLAKRARDEREVPVGAVLVLNNRVIGEGWNRAIGLHDPTAHAEIMALRQGGLVMQNYRLIDATLYVTFEPCVMCAGAMIHSRIGRVVFGVRNAKTGAAGSLMDVLHYPGMNHRVEITEGILADECAALLCTFFRMPRQVFNAQKKAQSSTDSGGSSGGSSGSETPGTSESATPESSGGSSGGSEIGKATAKYFFYSNIMNFFKTEITLANGEIRKRPLIETNGETGEIVWDKGRDFATVRKVLSMPQVNIVKKTEVQTGGFSKESILPKRNSDKLIARKKDWDPKKYGGFMQPTVAYSVLVVAKVEKGKSKKLKSVKELLGITIMERSSFEKNPIDFLEAKGYKEVKKDLIIKLPKYSLFELENGRKRMLASAKFLQKGNELALPSKYVNFLYLASHYEKLKGSPEDNEQKQLFVEQHKHYLDEIIEQISEFSKRVILADANLDKVLSAYNKHRDKPIREQAENIIHLFTLTNLGAPRAFKYFDTTIARKEYRSTKEVLDATLIHQSITGLYETRIDLSQLGGDGGSGGSGGSGGSGGSGGSGGMDKKYSIGLAIGTNSVGWAVITDEYKVPSKKFKVLGNTDRHSIKKNLIGALLFDSGETAEATRLKRTARRRYTRRKNRICYLQEIFSNEMAKVDDSFFHRLEESFLVEEDKKHERHPIFGNIVDEVAYHEKYPTIYHLRKKLVDSTDKADLRLIYLALAHMIKFRGHFLIEGDLNPDNSDVDKLFIQLVQTYNQLFEENPINASGVDAKAILSARLSKSRRLENLIAQLPGEKKNGLFGNLIALSLGLTPNFKSNFDLAEDAKLQLSKDTYDDDLDNLLAQIGDQYADLFLAAKNLSDAILLSDILRVNTEITKAPLSASMIKRYDEHHQDLTLLKALVRQQLPEKYKEIFFDQSKNGYAGYIDGGASQEEFYKFIKPILEKMDGTEELLVKLNREDLLRKQRTFDNGSIPHQIHLGELHAILRRQEDFYPFLKDNREKIEKILTFRIPYYVGPLARGNSRFAWMTRKSEETITPWNFEEVVDKGASAQSFIERMTNFDKNLPNEKVLPKHSLLYEYFTVYNELTKVKYVTEGMRKPAFLSGEQKKAIVDLLFKTNRKVTVKQLKEDYFKKIECFDSVEISGVEDRFNASLGTYHDLLKIIKDKDFLDNEENEDILEDIVLTLTLFEDREMIEERLKTYAHLFDDKVMKQLKRRRYTGWGRLSRKLINGIRDKQSGKTILDFLKSDGFANRNFMQLIHDDSLTFKEDIQKAQVSGQGDSLHEHIANLAGSPAIKKGILQTVKVVDELVKVMGRHKPENIVIEMARENQTTQKGQKNSRERMKRIEEGIKELGSQILKEHPVENTQLQNEKLYLYYLQNGRDMYVDQELDINRLSDYDVDHIVPQSFLKDDSIDNKVLTRSDKNRGKSDNVPSEEVVKKMKNYWRQLLNAKLITQRKFDNLTKAERGGLSELDKAGFIKRQLVETRQITKHVAQILDSRMNTKYDENDKLIREVKVITLKSKLVSDFRKDFQFYKVREINNYHHAHDAYLNAVVGTALIKKYPKLESEFVYGDYKVYDVRKMIAKSEQEGADKRTADGSEFESPKKKRKV

SEQ ID NO: 333 - protein, 1588 aa, synthetic construct
  REGION 1..1588: note = ABE8.8-m polypeptide sequence
  REGION 1..167: note = MISC_FEATURE - Adenosine deaminase sequence
  REGION 168..199: note = MISC_FEATURE - Linker sequence
  REGION 200..1566: note = MISC_FEATURE - Sequence derived from Cas9
  REGION 1567..1588: note = MISC_FEATURE - Bipartite nuclear localization sequence
MSEVEFSHEYWMRHALTLAKRARDEREVPVGAVLVLNNRVIGEGWNRAIGLHDPTAHAEIMALRQGGLVMQNYRLIDATLYVTFEPCVMCAGAMIHSRIGRVVFGVRNAKTGAAGSLMDVLHHPGMNHRVEITEGILADECAALLCRFFRMPRRVFNAQKKAQSSTDSGGSSGGSSGSETPGTSESATPESSGGSSGGSDKKYSIGLAIGTNSVGWAVITDEYKVPSKKFKVLGNTDRHSIKKNLIGALLFDSGETAEATRLKRTARRRYTRRKNRICYLQEIFSNEMAKVDDSFFHRLEESFLVEEDKKHERHPIFGNIVDEVAYHEKYPTIYHLRKKLVDSTDKADLRLIYLALAHMIKFRGHFLIEGDLNPDNSDVDKLFIQLVQTYNQLFEENPINASGVDAKAILSARLSKSRRLENLIAQLPGEKKNGLFGNLIALSLGLTPNFKSNFDLAEDAKLQLSKDTYDDDLDNLLAQIGDQYADLFLAAKNLSDAILLSDILRVNTEITKAPLSASMIKRYDEHHQDLTLLKALVRQQLPEKYKEIFFDQSKNGYAGYIDGGASQEEFYKFIKPILEKMDGTEELLVKLNREDLLRKQRTFDNGSIPHQIHLGELHAILRRQEDFYPFLKDNREKIEKILTFRIPYYVGPLARGNSRFAWMTRKSEETITPWNFEEVVDKGASAQSFIERMTNFDKNLPNEKVLPKHSLLYEYFTVYNELTKVKYVTEGMRKPAFLSGEQKKAIVDLLFKTNRKVTVKQLKEDYFKKIECFDSVEISGVEDRFNASLGTYHDLLKIIKDKDFLDNEENEDILEDIVLTLTLFEDREMIEERLKTYAHLFDDKVMKQLKRRRYTGWGRLSRKLINGIRDKQSGKTILDFLKSDGFANRNFMQLIHDDSLTFKEDIQKAQVSGQGDSLHEHIANLAGSPAIKKGILQTVKVVDELVKVMGRHKPENIVIEMARENQTTQKGQKNSRERMKRIEEGIKELGSQILKEHPVENTQLQNEKLYLYYLQNGRDMYVDQELDINRLSDYDVDHIVPQSFLKDDSIDNKVLTRSDKNRGKSDNVPSEEVVKKMKNYWRQLLNAKLITQRKFDNLTKAERGGLSELDKAGFIKRQLVETRQITKHVAQILDSRMNTKYDENDKLIREVKVITLKSKLVSDFRKDFQFYKVREINNYHHAHDAYLNAVVGTALIKKYPKLESEFVYGDYKVYDVRKMIAKSEQEIGKATAKYFFYSNIMNFFKTEITLANGEIRKRPLIETNGETGEIVWDKGRDFATVRKVLSMPQVNIVKKTEVQTGGFSKESILPKRNSDKLIARKKDWDPKKYGGFDSPTVAYSVLVVAKVEKGKSKKLKSVKELLGITIMERSSFEKNPIDFLEAKGYKEVKKDLIIKLPKYSLFELENGRKRMLASAGELQKGNELALPSKYVNFLYLASHYEKLKGSPEDNEQKQLFVEQHKHYLDEIIEQISEFSKRVILADANLDKVLSAYNKHRDKPIREQAENIIHLFTLTNLGAPAAFKYFDTTIDRKRYTSTKEVLDATLIHQSITGLYETRIDLSQLGGDEGADKRTADGSEFESPKKKRKV

SEQ ID NO: 334 - protein, 1786 aa, synthetic construct
  REGION 1..1786: note = ABE8.8-d polypeptide sequence
  REGION 1..167: note = MISC_FEATURE - Adenosine deaminase sequence
  REGION 168..199: note = MISC_FEATURE - Linker sequence
  REGION 200..365: note = MISC_FEATURE - Adenosine deaminase sequence
  REGION 366..397: note = MISC_FEATURE - Linker sequence
  REGION 398..1764: note = MISC_FEATURE - Sequence derived from Cas9
  REGION 1765..1786: note = MISC_FEATURE - Bipartite nuclear localization sequence
MSEVEFSHEYWMRHALTLAKRAWDEREVPVGAVLVHNNRVIGEGWNRPIGRHDPTAHAEIMALRQGGLVMQNYRLIDATLYVTLEPCVMCAGAMIHSRIGRVVFGARDAKTGAAGSLMDVLHHPGMNHRVEITEGILADECAALLSDFFRMRRQEIKAQKKAQSSTDSGGSSGGSSGSETPGTSESATPESSGGSSGGSSEVEFSHEYWMRHALTLAKRARDEREVPVGAVLVLNNRVIGEGWNRAIGLHDPTAHAEIMALRQGGLVMQNYRLIDATLYVTFEPCVMCAGAMIHSRIGRVVFGVRNAKTGAAGSLMDVLHHPGMNHRVEITEGILADECAALLCRFFRMPRRVFNAQKKAQSSTDSGGSSGGSSGSETPGTSESATPESSGGSSGGSDKKYSIGLAIGTNSVGWAVITDEYKVPSKKFKVLGNTDRHSIKKNLIGALLFDSGETAEATRLKRTARRRYTRRKNRICYLQEIFSNEMAKVDDSFFHRLEESFLVEEDKKHERHPIFGNIVDEVAYHEKYPTIYHLRKKLVDSTDKADLRLIYLALAHMIKFRGHFLIEGDLNPDNSDVDKLFIQLVQTYNQLFEENPINASGVDAKAILSARLSKSRRLENLIAQLPGEKKNGLFGNLIALSLGLTPNFKSNFDLAEDAKLQLSKDTYDDDLDNLLAQIGDQYADLFLAAKNLSDAILLSDILRVNTEITKAPLSASMIKRYDEHHQDLTLLKALVRQQLPEKYKEIFFDQSKNGYAGYIDGGASQEEFYKFIKPILEKMDGTEELLVKLNREDLLRKQRTFDNGSIPHQIHLGELHAILRRQEDFYPFLKDNREKIEKILTFRIPYYVGPLARGNSRFAWMTRKSEETITPWNFEEVVDKGASAQSFIERMTNFDKNLPNEKVLPKHSLLYEYFTVYNELTKVKYVTEGMRKPAFLSGEQKKAIVDLLFKTNRKVTVKQLKEDYFKKIECFDSVEISGVEDRFNASLGTYHDLLKIIKDKDFLDNEENEDILEDIVLTLTLFEDREMIEERLKTYAHLFDDKVMKQLKRRRYTGWGRLSRKLINGIRDKQSGKTILDFLKSDGFANRNFMQLIHDDSLTFKEDIQKAQVSGQGDSLHEHIANLAGSPAIKKGILQTVKVVDELVKVMGRHKPENIVIEMARENQTTQKGQKNSRERMKRIEEGIKELGSQILKEHPVENTQLQNEKLYLYYLQNGRDMYVDQELDINRLSDYDVDHIVPQSFLKDDSIDNKVLTRSDKNRGKSDNVPSEEVVKKMKNYWRQLLNAKLITQRKFDNLTKAERGGLSELDKAGFIKRQLVETRQITKHVAQILDSRMNTKYDENDKLIREVKVITLKSKLVSDFRKDFQFYKVREINNYHHAHDAYLNAVVGTALIKKYPKLESEFVYGDYKVYDVRKMIAKSEQEIGKATAKYFFYSNIMNFFKTEITLANGEIRKRPLIETNGETGEIVWDKGRDFATVRKVLSMPQVNIVKKTEVQTGGFSKESILPKRNSDKLIARKKDWDPKKYGGFDSPTVAYSVLVVAKVEKGKSKKLKSVKELLGITIMERSSFEKNPIDFLEAKGYKEVKKDLIIKLPKYSLFELENGRKRMLASAGELQKGNELALPSKYVNFLYLASHYEKLKGSPEDNEQKQLFVEQHKHYLDEIIEQISEFSKRVILADANLDKVLSAYNKHRDKPIREQAENIIHLFTLTNLGAPAAFKYFDTTIDRKRYTSTKEVLDATLIHQSITGLYETRIDLSQLGGDEGADKRTADGSEFESPKKKRKV

SEQ ID NO: 335 - protein, 1588 aa, synthetic construct
  REGION 1..1588: note = ABE8.13-m polypeptide sequence
  REGION 1..167: note = MISC_FEATURE - Adenosine deaminase sequence
  REGION 168..199: note = MISC_FEATURE - Linker sequence
  REGION 200..1566: note = MISC_FEATURE - Sequence derived from Cas9
  REGION 1567..1588: note = MISC_FEATURE - Bipartite nuclear localization sequence
MSEVEFSHEYWMRHALTLAKRARDEREVPVGAVLVLNNRVIGEGWNRAIGLHDPTAHAEIMALRQGGLVMQNYRLYDATLYVTFEPCVMCAGAMIHSRIGRVVFGVRNAKTGAAGSLMDVLHHPGMNHRVEITEGILADECAALLCRFFRMPRRVFNAQKKAQSSTDSGGSSGGSSGSETPGTSESATPESSGGSSGGSDKKYSIGLAIGTNSVGWAVITDEYKVPSKKFKVLGNTDRHSIKKNLIGALLFDSGETAEATRLKRTARRRYTRRKNRICYLQEIFSNEMAKVDDSFFHRLEESFLVEEDKKHERHPIFGNIVDEVAYHEKYPTIYHLRKKLVDSTDKADLRLIYLALAHMIKFRGHFLIEGDLNPDNSDVDKLFIQLVQTYNQLFEENPINASGVDAKAILSARLSKSRRLENLIAQLPGEKKNGLFGNLIALSLGLTPNFKSNFDLAEDAKLQLSKDTYDDDLDNLLAQIGDQYADLFLAAKNLSDAILLSDILRVNTEITKAPLSASMIKRYDEHHQDLTLLKALVRQQLPEKYKEIFFDQSKNGYAGYIDGGASQEEFYKFIKPILEKMDGTEELLVKLNREDLLRKQRTFDNGSIPHQIHLGELHAILRRQEDFYPFLKDNREKIEKILTFRIPYYVGPLARGNSRFAWMTRKSEETITPWNFEEVVDKGASAQSFIERMTNFDKNLPNEKVLPKHSLLYEYFTVYNELTKVKYVTEGMRKPAFLSGEQKKAIVDLLFKTNRKVTVKQLKEDYFKKIECFDSVEISGVEDRFNASLGTYHDLLKIIKDKDFLDNEENEDILEDIVLTLTLFEDREMIEERLKTYAHLFDDKVMKQLKRRRYTGWGRLSRKLINGIRDKQSGKTILDFLKSDGFANRNFMQLIHDDSLTFKEDIQKAQVSGQGDSLHEHIANLAGSPAIKKGILQTVKVVDELVKVMGRHKPENIVIEMARENQTTQKGQKNSRERMKRIEEGIKELGSQILKEHPVENTQLQNEKLYLYYLQNGRDMYVDQELDINRLSDYDVDHIVPQSFLKDDSIDNKVLTRSDKNRGKSDNVPSEEVVKKMKNYWRQLLNAKLITQRKFDNLTKAERGGLSELDKAGFIKRQLVETRQITKHVAQILDSRMNTKYDENDKLIREVKVITLKSKLVSDFRKDFQFYKVREINNYHHAHDAYLNAVVGTALIKKYPKLESEFVYGDYKVYDVRKMIAKSEQEIGKATAKYFFYSNIMNFFKTEITLANGEIRKRPLIETNGETGEIVWDKGRDFATVRKVLSMPQVNIVKKTEVQTGGFSKESILPKRNSDKLIARKKDWDPKKYGGFDSPTVAYSVLVVAKVEKGKSKKLKSVKELLGITIMERSSFEKNPIDFLEAKGYKEVKKDLIIKLPKYSLFELENGRKRMLASAGELQKGNELALPSKYVNFLYLASHYEKLKGSPEDNEQKQLFVEQHKHYLDEIIEQISEFSKRVILADANLDKVLSAYNKHRDKPIREQAENIIHLFTLTNLGAPAAFKYFDTTIDRKRYTSTKEVLDATLIHQSITGLYETRIDLSQLGGDEGADKRTADGSEFESPKKKRKV

SEQ ID NO: 336 - protein, 1786 aa, synthetic construct
  REGION 1..1786: note = ABE8.13-d polypeptide sequence
  REGION 1..167: note = MISC_FEATURE - Adenosine deaminase sequence
  REGION 168..199: note = MISC_FEATURE - Linker sequence
  REGION 200..365: note = MISC_FEATURE - Adenosine deaminase sequence
  REGION 366..397: note = MISC_FEATURE - Linker sequence
  REGION 398..1764: note = MISC_FEATURE - Sequence derived from Cas9
  REGION 1765..1786: note = MISC_FEATURE - Bipartite nuclear localization sequence
MSEVEFSHEYWMRHALTLAKRAWDEREVPVGAVLVHNNRVIGEGWNRPIGRHDPTAHAEIMALRQGGLVMQNYRLIDATLYVTLEPCVMCAGAMIHSRIGRVVFGARDAKTGAAGSLMDVLHHPGMNHRVEITEGILADECAALLSDFFRMRRQEIKAQKKAQSSTDSGGSSGGSSGSETPGTSESATPESSGGSSGGSSEVEFSHEYWMRHALTLAKRARDEREVPVGAVLVLNNRVIGEGWNRAIGLHDPTAHAEIMALRQGGLVMQNYRLYDATLYVTFEPCVMCAGAMIHSRIGRVVFGVRNAKTGAAGSLMDVLHHPGMNHRVEITEGILADECAALLCRFFRMPRRVFNAQKKAQSSTDSGGSSGGSSGSETPGTSESATPESSGGSSGGSDKKYSIGLAIGTNSVGWAVITDEYKVPSKKFKVLGNTDRHSIKKNLIGALLFDSGETAEATRLKRTARRRYTRRKNRICYLQEIFSNEMAKVDDSFFHRLEESFLVEEDKKHERHPIFGNIVDEVAYHEKYPTIYHLRKKLVDSTDKADLRLIYLALAHMIKFRGHFLIEGDLNPDNSDVDKLFIQLVQTYNQLFEENPINASGVDAKAILSARLSKSRRLENLIAQLPGEKKNGLFGNLIALSLGLTPNFKSNFDLAEDAKLQLSKDTYDDDLDNLLAQIGDQYADLFLAAKNLSDAILLSDILRVNTEITKAPLSASMIKRYDEHHQDLTLLKALVRQQLPEKYKEIFFDQSKNGYAGYIDGGASQEEFYKFIKPILEKMDGTEELLVKLNREDLLRKQRTFDNGSIPHQIHLGELHAILRRQEDFYPFLKDNREKIEKILTFRIPYYVGPLARGNSRFAWMTRKSEETITPWNFEEVVDKGASAQSFIERMTNFDKNLPNEKVLPKHSLLYEYFTVYNELTKVKYVTEGMRKPAFLSGEQKKAIVDLLFKTNRKVTVKQLKEDYFKKIECFDSVEISGVEDRFNASLGTYHDLLKIIKDKDFLDNEENEDILEDIVLTLTLFEDREMIEERLKTYAHLFDDKVMKQLKRRRYTGWGRLSRKLINGIRDKQSGKTILDFLKSDGFANRNFMQLIHDDSLTFKEDIQKAQVSGQGDSLHEHIANLAGSPAIKKGILQTVKVVDELVKVMGRHKPENIVIEMARENQTTQKGQKNSRERMKRIEEGIKELGSQILKEHPVENTQLQNEKLYLYYLQNGRDMYVDQELDINRLSDYDVDHIVPQSFLKDDSIDNKVLTRSDKNRGKSDNVPSEEVVKKMKNYWRQLLNAKLITQRKFDNLTKAERGGLSELDKAGFIKRQLVETRQITKHVAQILDSRMNTKYDENDKLIREVKVITLKSKLVSDFRKDFQFYKVREINNYHHAHDAYLNAVVGTALIKKYPKLESEFVYGDYKVYDVRKMIAKSEQEIGKATAKYFFYSNIMNFFKTEITLANGEIRKRPLIETNGETGEIVWDKGRDFATVRKVLSMPQVNIVKKTEVQTGGFSKESILPKRNSDKLIARKKDWDPKKYGGFDSPTVAYSVLVVAKVEKGKSKKLKSVKELLGITIMERSSFEKNPIDFLEAKGYKEVKKDLIIKLPKYSLFELENGRKRMLASAGELQKGNELALPSKYVNFLYLASHYEKLKGSPEDNEQKQLFVEQHKHYLDEIIEQISEFSKRVILADANLDKVLSAYNKHRDKPIREQAENIIHLFTLTNLGAPAAFKYFDTTIDRKRYTSTKEVLDATLIHQSITGLYETRIDLSQLGGDEGADKRTADGSEFESPKKKRKV

SEQ ID NO: 337 - protein, 1588 aa, synthetic construct
  REGION 1..1588: note = ABE8.17-m polypeptide sequence
  REGION 1..167: note = MISC_FEATURE - Adenosine deaminase sequence
  REGION 168..199: note = MISC_FEATURE - Linker sequence
  REGION 200..1566: note = MISC_FEATURE - Sequence derived from Cas9
  REGION 1567..1588: note = MISC_FEATURE - Bipartite nuclear localization sequence
MSEVEFSHEYWMRHALTLAKRARDEREVPVGAVLVLNNRVIGEGWNRAIGLHDPTAHAEIMALRQGGLVMQNYRLIDATLYSTFEPCVMCAGAMIHSRIGRVVFGVRNAKTGAAGSLMDVLHYPGMNHRVEITEGILADECAALLCYFFRMPRRVFNAQKKAQSSTDSGGSSGGSSGSETPGTSESATPESSGGSSGGSDKKYSIGLAIGTNSVGWAVITDEYKVPSKKFKVLGNTDRHSIKKNLIGALLFDSGETAEATRLKRTARRRYTRRKNRICYLQEIFSNEMAKVDDSFFHRLEESFLVEEDKKHERHPIFGNIVDEVAYHEKYPTIYHLRKKLVDSTDKADLRLIYLALAHMIKFRGHFLIEGDLNPDNSDVDKLFIQLVQTYNQLFEENPINASGVDAKAILSARLSKSRRLENLIAQLPGEKKNGLFGNLIALSLGLTPNFKSNFDLAEDAKLQLSKDTYDDDLDNLLAQIGDQYADLFLAAKNLSDAILLSDILRVNTEITKAPLSASMIKRYDEHHQDLTLLKALVRQQLPEKYKEIFFDQSKNGYAGYIDGGASQEEFYKFIKPILEKMDGTEELLVKLNREDLLRKQRTFDNGSIPHQIHLGELHAILRRQEDFYPFLKDNREKIEKILTFRIPYYVGPLARGNSRFAWMTRKSEETITPWNFEEVVDKGASAQSFIERMTNFDKNLPNEKVLPKHSLLYEYFTVYNELTKVKYVTEGMRKPAFLSGEQKKAIVDLLFKTNRKVTVKQLKEDYFKKIECFDSVEISGVEDRFNASLGTYHDLLKIIKDKDFLDNEENEDILEDIVLTLTLFEDREMIEERLKTYAHLFDDKVMKQLKRRRYTGWGRLSRKLINGIRDKQSGKTILDFLKSDGFANRNFMQLIHDDSLTFKEDIQKAQVSGQGDSLHEHIANLAGSPAIKKGILQTVKVVDELVKVMGRHKPENIVIEMARENQTTQKGQKNSRERMKRIEEGIKELGSQILKEHPVENTQLQNEKLYLYYLQNGRDMYVDQELDINRLSDYDVDHIVPQSFLKDDSIDNKVLTRSDKNRGKSDNVPSEEVVKKMKNYWRQLLNAKLITQRKFDNLTKAERGGLSELDKAGFIKRQLVETRQITKHVAQILDSRMNTKYDENDKLIREVKVITLKSKLVSDFRKDFQFYKVREINNYHHAHDAYLNAVVGTALIKKYPKLESEFVYGDYKVYDVRKMIAKSEQEIGKATAKYFFYSNIMNFFKTEITLANGEIRKRPLIETNGETGEIVWDKGRDFATVRKVLSMPQVNIVKKTEVQTGGFSKESILPKRNSDKLIARKKDWDPKKYGGFDSPTVAYSVLVVAKVEKGKSKKLKSVKELLGITIMERSSFEKNPIDFLEAKGYKEVKKDLIIKLPKYSLFELENGRKRMLASAGELQKGNELALPSKYVNFLYLASHYEKLKGSPEDNEQKQLFVEQHKHYLDEIIEQISEFSKRVILADANLDKVLSAYNKHRDKPIREQAENIIHLFTLTNLGAPAAFKYFDTTIDRKRYTSTKEVLDATLIHQSITGLYETRIDLSQLGGDEGADKRTADGSEFESPKKKRKV

SEQ ID NO: 338 - protein, 1786 aa, synthetic construct
  REGION 1..1786: note = ABE8.17-d polypeptide sequence
  REGION 1..167: note = MISC_FEATURE - Adenosine deaminase sequence
  REGION 168..199: note = MISC_FEATURE - Linker sequence
  REGION 200..365: note = MISC_FEATURE - Adenosine deaminase sequence
  REGION 366..397: note = MISC_FEATURE - Linker sequence
  REGION 398..1764: note = MISC_FEATURE - Sequence derived from Cas9
  REGION 1765..1786: note = MISC_FEATURE - Bipartite nuclear localization sequence
MSEVEFSHEYWMRHALTLAKRAWDEREVPVGAVLVHNNRVIGEGWNRPIGRHDPTAHAEIMALRQGGLVMQNYRLIDATLYVTLEPCVMCAGAMIHSRIGRVVFGARDAKTGAAGSLMDVLHHPGMNHRVEITEGILADECAALLSDFFRMRRQEIKAQKKAQSSTDSGGSSGGSSGSETPGTSESATPESSGGSSGGSSEVEFSHEYWMRHALTLAKRARDEREVPVGAVLVLNNRVIGEGWNRAIGLHDPTAHAEIMALRQGGLVMQNYRLIDATLYSTFEPCVMCAGAMIHSRIGRVVFGVRNAKTGAAGSLMDVLHYPGMNHRVEITEGILADECAALLCYFFRMPRRVFNAQKKAQSSTDSGGSSGGSSGSETPGTSESATPESSGGSSGGSDKKYSIGLAIGTNSVGWAVITDEYKVPSKKFKVLGNTDRHSIKKNLIGALLFDSGETAEATRLKRTARRRYTRRKNRICYLQEIFSNEMAKVDDSFFHRLEESFLVEEDKKHERHPIFGNIVDEVAYHEKYPTIYHLRKKLVDSTDKADLRLIYLALAHMIKFRGHFLIEGDLNPDNSDVDKLFIQLVQTYNQLFEENPINASGVDAKAILSARLSKSRRLENLIAQLPGEKKNGLFGNLIALSLGLTPNFKSNFDLAEDAKLQLSKDTYDDDLDNLLAQIGDQYADLFLAAKNLSDAILLSDILRVNTEITKAPLSASMIKRYDEHHQDLTLLKALVRQQLPEKYKEIFFDQSKNGYAGYIDGGASQEEFYKFIKPILEKMDGTEELLVKLNREDLLRKQRTFDNGSIPHQIHLGELHAILRRQEDFYPFLKDNREKIEKILTFRIPYYVGPLARGNSRFAWMTRKSEETITPWNFEEVVDKGASAQSFIERMTNFDKNLPNEKVLPKHSLLYEYFTVYNELTKVKYVTEGMRKPAFLSGEQKKAIVDLLFKTNRKVTVKQLKEDYFKKIECFDSVEISGVEDRFNASLGTYHDLLKIIKDKDFLDNEENEDILEDIVLTLTLFEDREMIEERLKTYAHLFDDKVMKQLKRRRYTGWGRLSRKLINGIRDKQSGKTILDFLKSDGFANRNFMQLIHDDSLTFKEDIQKAQVSGQGDSLHEHIANLAGSPAIKKGILQTVKVVDELVKVMGRHKPENIVIEMARENQTTQKGQKNSRERMKRIEEGIKELGSQILKEHPVENTQLQNEKLYLYYLQNGRDMYVDQELDINRLSDYDVDHIVPQSFLKDDSIDNKVLTRSDKNRGKSDNVPSEEVVKKMKNYWRQLLNAKLITQRKFDNLTKAERGGLSELDKAGFIKRQLVETRQITKHVAQILDSRMNTKYDENDKLIREVKVITLKSKLVSDFRKDFQFYKVREINNYHHAHDAYLNAVVGTALIKKYPKLESEFVYGDYKVYDVRKMIAKSEQEIGKATAKYFFYSNIMNFFKTEITLANGEIRKRPLIETNGETGEIVWDKGRDFATVRKVLSMPQVNIVKKTEVQTGGFSKESILPKRNSDKLIARKKDWDPKKYGGFDSPTVAYSVLVVAKVEKGKSKKLKSVKELLGITIMERSSFEKNPIDFLEAKGYKEVKKDLIIKLPKYSLFELENGRKRMLASAGELQKGNELALPSKYVNFLYLASHYEKLKGSPEDNEQKQLFVEQHKHYLDEIIEQISEFSKRVILADANLDKVLSAYNKHRDKPIREQAENIIHLFTLTNLGAPAAFKYFDTTIDRKRYTSTKEVLDATLIHQSITGLYETRIDLSQLGGDEGADKRTADGSEFESPKKKRKV

SEQ ID NO: 339 - protein, 1588 aa, synthetic construct
  REGION 1..1588: note = ABE8.20-m polypeptide sequence
  REGION 1..167: note = MISC_FEATURE - Adenosine deaminase sequence
  REGION 168..199: note = MISC_FEATURE - Linker sequence
  REGION 200..1566: note = MISC_FEATURE - Sequence derived from Cas9
  REGION 1567..1588: note = MISC_FEATURE - Bipartite nuclear localization sequence
MSEVEFSHEYWMRHALTLAKRARDEREVPVGAVLVLNNRVIGEGWNRAIGLHDPTAHAEIMALRQGGLVMQNYRLYDATLYSTFEPCVMCAGAMIHSRIGRVVFGVRNAKTGAAGSLMDVLHHPGMNHRVEITEGILADECAALLCRFFRMPRRVFNAQKKAQSSTDSGGSSGGSSGSETPGTSESATPESSGGSSGGSDKKYSIGLAIGTNSVGWAVITDEYKVPSKKFKVLGNTDRHSIKKNLIGALLFDSGETAEATRLKRTARRRYTRRKNRICYLQEIFSNEMAKVDDSFFHRLEESFLVEEDKKHERHPIFGNIVDEVAYHEKYPTIYHLRKKLVDSTDKADLRLIYLALAHMIKFRGHFLIEGDLNPDNSDVDKLFIQLVQTYNQLFEENPINASGVDAKAILSARLSKSRRLENLIAQLPGEKKNGLFGNLIALSLGLTPNFKSNFDLAEDAKLQLSKDTYDDDLDNLLAQIGDQYADLFLAAKNLSDAILLSDILRVNTEITKAPLSASMIKRYDEHHQDLTLLKALVRQQLPEKYKEIFFDQSKNGYAGYIDGGASQEEFYKFIKPILEKMDGTEELLVKLNREDLLRKQRTFDNGSIPHQIHLGELHAILRRQEDFYPFLKDNREKIEKILTFRIPYYVGPLARGNSRFAWMTRKSEETITPWNFEEVVDKGASAQSFIERMTNFDKNLPNEKVLPKHSLLYEYFTVYNELTKVKYVTEGMRKPAFLSGEQKKAIVDLLFKTNRKVTVKQLKEDYFKKIECFDSVEISGVEDRFNASLGTYHDLLKIIKDKDFLDNEENEDILEDIVLTLTLFEDREMIEERLKTYAHLFDDKVMKQLKRRRYTGWGRLSRKLINGIRDKQSGKTILDFLKSDGFANRNFMQLIHDDSLTFKEDIQKAQVSGQGDSLHEHIANLAGSPAIKKGILQTVKVVDELVKVMGRHKPENIVIEMARENQTTQKGQKNSRERMKRIEEGIKELGSQILKEHPVENTQLQNEKLYLYYLQNGRDMYVDQELDINRLSDYDVDHIVPQSFLKDDSIDNKVLTRSDKNRGKSDNVPSEEVVKKMKNYWRQLLNAKLITQRKFDNLTKAERGGLSELDKAGFIKRQLVETRQITKHVAQILDSRMNTKYDENDKLIREVKVITLKSKLVSDFRKDFQFYKVREINNYHHAHDAYLNAVVGTALIKKYPKLESEFVYGDYKVYDVRKMIAKSEQEIGKATAKYFFYSNIMNFFKTEITLANGEIRKRPLIETNGETGEIVWDKGRDFATVRKVLSMPQVNIVKKTEVQTGGFSKESILPKRNSDKLIARKKDWDPKKYGGFDSPTVAYSVLVVAKVEKGKSKKLKSVKELLGITIMERSSFEKNPIDFLEAKGYKEVKKDLIIKLPKYSLFELENGRKRMLASAGELQKGNELALPSKYVNFLYLASHYEKLKGSPEDNEQKQLFVEQHKHYLDEIIEQISEFSKRVILADANLDKVLSAYNKHRDKPIREQAENIIHLFTLTNLGAPAAFKYFDTTIDRKRYTSTKEVLDATLIHQSITGLYETRIDLSQLGGDEGADKRTADGSEFESPKKKRKV

SEQ ID NO: 340 - protein, 1786 aa, synthetic construct
  REGION 1..1786: note = ABE8.20-d polypeptide sequence
  REGION 1..167: note = MISC_FEATURE - Adenosine deaminase sequence
  REGION 168..199: note = MISC_FEATURE - Linker sequence
  REGION 200..365: note = MISC_FEATURE - Adenosine deaminase sequence
  REGION 366..397: note = MISC_FEATURE - Linker sequence
  REGION 398..1764: note = MISC_FEATURE - Sequence derived from Cas9
  REGION 1765..1786: note = MISC_FEATURE - Bipartite nuclear localization sequence
MSEVEFSHEYWMRHALTLAKRAWDEREVPVGAVLVHNNRVIGEGWNRPIGRHDPTAHAEIMALRQGGLVMQNYRLIDATLYVTLEPCVMCAGAMIHSRIGRVVFGARDAKTGAAGSLMDVLHHPGMNHRVEITEGILADECAALLSDFFRMRRQEIKAQKKAQSSTDSGGSSGGSSGSETPGTSESATPESSGGSSGGSSEVEFSHEYWMRHALTLAKRARDEREVPVGAVLVLNNRVIGEGWNRAIGLHDPTAHAEIMALRQGGLVMQNYRLYDATLYSTFEPCVMCAGAMIHSRIGRVVFGVRNAKTGAAGSLMDVLHHPGMNHRVEITEGILADECAALLCRFFRMPRRVFNAQKKAQSSTDSGGSSGGSSGSETPGTSESATPESSGGSSGGSDKKYSIGLAIGTNSVGWAVITDEYKVPSKKFKVLGNTDRHSIKKNLIGALLFDSGETAEATRLKRTARRRYTRRKNRICYLQEIFSNEMAKVDDSFFHRLEESFLVEEDKKHERHPIFGNIVDEVAYHEKYPTIYHLRKKLVDSTDKADLRLIYLALAHMIKFRGHFLIEGDLNPDNSDVDKLFIQLVQTYNQLFEENPINASGVDAKAILSARLSKSRRLENLIAQLPGEKKNGLFGNLIALSLGLTPNFKSNFDLAEDAKLQLSKDTYDDDLDNLLAQIGDQYADLFLAAKNLSDAILLSDILRVNTEITKAPLSASMIKRYDEHHQDLTLLKALVRQQLPEKYKEIFFDQSKNGYAGYIDGGASQEEFYKFIKPILEKMDGTEELLVKLNREDLLRKQRTFDNGSIPHQIHLGELHAILRRQEDFYPFLKDNREKIEKILTFRIPYYVGPLARGNSRFAWMTRKSEETITPWNFEEVVDKGASAQSFIERMTNFDKNLPNEKVLPKHSLLYEYFTVYNELTKVKYVTEGMRKPAFLSGEQKKAIVDLLFKTNRKVTVKQLKEDYFKKIECFDSVEISGVEDRFNASLGTYHDLLKIIKDKDFLDNEENEDILEDIVLTLTLFEDREMIEERLKTYAHLFDDKVMKQLKRRRYTGWGRLSRKLINGIRDKQSGKTILDFLKSDGFANRNFMQLIHDDSLTFKEDIQKAQVSGQGDSLHEHIANLAGSPAIKKGILQTVKVVDELVKVMGRHKPENIVIEMARENQTTQKGQKNSRERMKRIEEGIKELGSQILKEHPVENTQLQNEKLYLYYLQNGRDMYVDQELDINRLSDYDVDHIVPQSFLKDDSIDNKVLTRSDKNRGKSDNVPSEEVVKKMKNYWRQLLNAKLITQRKFDNLTKAERGGLSELDKAGFIKRQLVETRQITKHVAQILDSRMNTKYDENDKLIREVKVITLKSKLVSDFRKDFQFYKVREINNYHHAHDAYLNAVVGTALIKKYPKLESEFVYGDYKVYDVRKMIAKSEQEIGKATAKYFFYSNIMNFFKTEITLANGEIRKRPLIETNGETGEIVWDKGRDFATVRKVLSMPQVNIVKKTEVQTGGFSKESILPKRNSDKLIARKKDWDPKKYGGFDSPTVAYSVLVVAKVEKGKSKKLKSVKELLGITIMERSSFEKNPIDFLEAKGYKEVKKDLIIKLPKYSLFELENGRKRMLASAGELQKGNELALPSKYVNFLYLASHYEKLKGSPEDNEQKQLFVEQHKHYLDEIIEQISEFSKRVILADANLDKVLSAYNKHRDKPIREQAENIIHLFTLTNLGAPAAFKYFDTTIDRKRYTSTKEVLDATLIHQSITGLYETRIDLSQLGGDEGADKRTADGSEFESPKKKRKV

SEQ ID NO: 341 - protein, 1588 aa, synthetic construct
  REGION 1..1588: note = 01. monoABE8.1_bpNLS + Y147T polypeptide sequence
MSEVEFSHEYWMRHALTLAKRARDEREVPVGAVLVLNNRVIGEGWNRAIGLHDPTAHAEIMALRQGGLVMQNYRLIDATLYVTFEPCVMCAGAMIHSRIGRVVFGVRNAKTGAAGSLMDVLHYPGMNHRVEITEGILADECAALLCTFFRMPRQVFNAQKKAQSSTDSGGSSGGSSGSETPGTSESATPESSGGSSGGSDKKYSIGLAIGTNSVGWAVITDEYKVPSKKFKVLGNTDRHSIKKNLIGALLFDSGETAEATRLKRTARRRYTRRKNRICYLQEIFSNEMAKVDDSFFHRLEESFLVEEDKKHERHPIFGNIVDEVAYHEKYPTIYHLRKKLVDSTDKADLRLIYLALAHMIKFRGHFLIEGDLNPDNSDVDKLFIQLVQTYNQLFEENPINASGVDAKAILSARLSKSRRLENLIAQLPGEKKNGLFGNLIALSLGLTPNFKSNFDLAEDAKLQLSKDTYDDDLDNLLAQIGDQYADLFLAAKNLSDAILLSDILRVNTEITKAPLSASMIKRYDEHHQDLTLLKALVRQQLPEKYKEIFFDQSKNGYAGYIDGGASQEEFYKFIKPILEKMDGTEELLVKLNREDLLRKQRTFDNGSIPHQIHLGELHAILRRQEDFYPFLKDNREKIEKILTFRIPYYVGPLARGNSRFAWMTRKSEETITPWNFEEVVDKGASAQSFIERMTNFDKNLPNEKVLPKHSLLYEYFTVYNELTKVKYVTEGMRKPAFLSGEQKKAIVDLLFKTNRKVTVKQLKEDYFKKIECFDSVEISGVEDRFNASLGTYHDLLKIIKDKDFLDNEENEDILEDIVLTLTLFEDREMIEERLKTYAHLFDDKVMKQLKRRRYTGWGRLSRKLINGIRDKQSGKTILDFLKSDGFANRNFMQLIHDDSLTFKEDIQKAQVSGQGDSLHEHIANLAGSPAIKKGILQTVKVVDELVKVMGRHKPENIVIEMARENQTTQKGQKNSRERMKRIEEGIKELGSQILKEHPVENTQLQNEKLYLYYLQNGRDMYVDQELDINRLSDYDVDHIVPQSFLKDDSIDNKVLTRSDKNRGKSDNVPSEEVVKKMKNYWRQLLNAKLITQRKFDNLTKAERGGLSELDKAGFIKRQLVETRQITKHVAQILDSRMNTKYDENDKLIREVKVITLKSKLVSDFRKDFQFYKVREINNYHHAHDAYLNAVVGTALIKKYPKLESEFVYGDYKVYDVRKMIAKSEQEIGKATAKYFFYSNIMNFFKTEITLANGEIRKRPLIETNGETGEIVWDKGRDFATVRKVLSMPQVNIVKKTEVQTGGFSKESILPKRNSDKLIARKKDWDPKKYGGFVSPTVAYSVLVVAKVEKGKSKKLKSVKELLGITIMERSSFEKNPIDFLEAKGYKEVKKDLIIKLPKYSLFELENGRKRMLASARELQKGNELALPSKYVNFLYLASHYEKLKGSPEDNEQKQLFVEQHKHYLDEIIEQISEFSKRVILADANLDKVLSAYNKHRDKPIREQAENIIHLFTLTNLGAPAAFKYFDTTIDRKQYRSTKEVLDATLIHQSITGLYETRIDLSQLGGDEGADKRTADGSEFESPKKKRKV

SEQ ID NO: 342 - protein, 1588 aa, synthetic construct
  REGION 1..1588: note = 02. monoABE8.1_bpNLS + Y147R polypeptide sequence
MSEVEFSHEYWMRHALTLAKRARDEREVPVGAVLVLNNRVIGEGWNRAIGLHDPTAHAEIMALRQGGLVMQNYRLIDATLYVTFEPCVMCAGAMIHSRIGRVVFGVRNAKTGAAGSLMDVLHYPGMNHRVEITEGILADECAALLCRFFRMPRQVFNAQKKAQSSTDSGGSSGGSSGSETPGTSESATPESSGGSSGGSDKKYSIGLAIGTNSVGWAVITDEYKVPSKKFKVLGNTDRHSIKKNLIGALLFDSGETAEATRLKRTARRRYTRRKNRICYLQEIFSNEMAKVDDSFFHRLEESFLVEEDKKHERHPIFGNIVDEVAYHEKYPTIYHLRKKLVDSTDKADLRLIYLALAHMIKFRGHFLIEGDLNPDNSDVDKLFIQLVQTYNQLFEENPINASGVDAKAILSARLSKSRRLENLIAQLPGEKKNGLFGNLIALSLGLTPNFKSNFDLAEDAKLQLSKDTYDDDLDNLLAQIGDQYADLFLAAKNLSDAILLSDILRVNTEITKAPLSASMIKRYDEHHQDLTLLKALVRQQLPEKYKEIFFDQSKNGYAGYIDGGASQEEFYKFIKPILEKMDGTEELLVKLNREDLLRKQRTFDNGSIPHQIHLGELHAILRRQEDFYPFLKDNREKIEKILTFRIPYYVGPLARGNSRFAWMTRKSEETITPWNFEEVVDKGASAQSFIERMTNFDKNLPNEKVLPKHSLLYEYFTVYNELTKVKYVTEGMRKPAFLSGEQKKAIVDLLFKTNRKVTVKQLKEDYFKKIECFDSVEISGVEDRFNASLGTYHDLLKIIKDKDFLDNEENEDILEDIVLTLTLFEDREMIEERLKTYAHLFDDKVMKQLKRRRYTGWGRLSRKLINGIRDKQSGKTILDFLKSDGFANRNFMQLIHDDSLTFKEDIQKAQVSGQGDSLHEHIANLAGSPAIKKGILQTVKVVDELVKVMGRHKPENIVIEMARENQTTQKGQKNSRERMKRIEEGIKELGSQILKEHPVENTQLQNEKLYLYYLQNGRDMYVDQELDINRLSDYDVDHIVPQSFLKDDSIDNKVLTRSDKNRGKSDNVPSEEVVKKMKNYWRQLLNAKLITQRKFDNLTKAERGGLSELDKAGFIKRQLVETRQITKHVAQILDSRMNTKYDENDKLIREVKVITLKSKLVSDFRKDFQFYKVREINNYHHAHDAYLNAVVGTALIKKYPKLESEFVYGDYKVYDVRKMIAKSEQEIGKATAKYFFYSNIMNFFKTEITLANGEIRKRPLIETNGETGEIVWDKGRDFATVRKVLSMPQVNIVKKTEVQTGGFSKESILPKRNSDKLIARKKDWDPKKYGGFVSPTVAYSVLVVAKVEKGKSKKLKSVKELLGITIMERSSFEKNPIDFLEAKGYKEVKKDLIIKLPKYSLFELENGRKRMLASARELQKGNELALPSKYVNFLYLASHYEKLKGSPEDNEQKQLFVEQHKHYLDEIIEQISEFSKRVILADANLDKVLSAYNKHRDKPIREQAENIIHLFTLTNLGAPAAFKYFDTTIDRKQYRSTKEVLDATLIHQSITGLYETRIDLSQLGGDEGADKRTADGSEFESPKKKRKV

SEQ ID NO: 343 - protein, 1588 aa, synthetic construct
  REGION 1..1588: note = 03. monoABE8.1_bpNLS + Q154S polypeptide sequence
MSEVEFSHEYWMRHALTLAKRARDEREVPVGAVLVLNNRVIGEGWNRAIGLHDPTAHAEIMALRQGGLVMQNYRLIDATLYVTFEPCVMCAGAMIHSRIGRVVFGVRNAKTGAAGSLMDVLHYPGMNHRVEITEGILADECAALLCYFFRMPRSVFNAQKKAQSSTDSGGSSGGSSGSETPGTSESATPESSGGSSGGSDKKYSIGLAIGTNSVGWAVITDEYKVPSKKFKVLGNTDRHSIKKNLIGALLFDSGETAEATRLKRTARRRYTRRKNRICYLQEIFSNEMAKVDDSFFHRLEESFLVEEDKKHERHPIFGNIVDEVAYHEKYPTIYHLRKKLVDSTDKADLRLIYLALAHMIKFRGHFLIEGDLNPDNSDVDKLFIQLVQTYNQLFEENPINASGVDAKAILSARLSKSRRLENLIAQLPGEKKNGLFGNLIALSLGLTPNFKSNFDLAEDAKLQLSKDTYDDDLDNLLAQIGDQYADLFLAAKNLSDAILLSDILRVNTEITKAPLSASMIKRYDEHHQDLTLLKALVRQQLPEKYKEIFFDQSKNGYAGYIDGGASQEEFYKFIKPILEKMDGTEELLVKLNREDLLRKQRTFDNGSIPHQIHLGELHAILRRQEDFYPFLKDNREKIEKILTFRIPYYVGPLARGNSRFAWMTRKSEETITPWNFEEVVDKGASAQSFIERMTNFDKNLPNEKVLPKHSLLYEYFTVYNELTKVKYVTEGMRKPAFLSGEQKKAIVDLLFKTNRKVTVKQLKEDYFKKIECFDSVEISGVEDRFNASLGTYHDLLKIIKDKDFLDNEENEDILEDIVLTLTLFEDREMIEERLKTYAHLFDDKVMKQLKRRRYTGWGRLSRKLINGIRDKQSGKTILDFLKSDGFANRNFMQLIHDDSLTFKEDIQKAQVSGQGDSLHEHIANLAGSPAIKKGILQTVKVVDELVKVMGRHKPENIVIEMARENQTTQKGQKNSRERMKRIEEGIKELGSQILKEHPVENTQLQNEKLYLYYLQNGRDMYVDQELDINRLSDYDVDHIVPQSFLKDDSIDNKVLTRSDKNRGKSDNVPSEEVVKKMKNYWRQLLNAKLITQRKFDNLTKAERGGLSELDKAGFIKRQLVETRQITKHVAQILDSRMNTKYDENDKLIREVKVITLKSKLVSDFRKDFQFYKVREINNYHHAHDAYLNAVVGTALIKKYPKLESEFVYGDYKVYDVRKMIAKSEQEIGKATAKYFFYSNIMNFFKTEITLANGEIRKRPLIETNGETGEIVWDKGRDFATVRKVLSMPQVNIVKKTEVQTGGFSKESILPKRNSDKLIARKKDWDPKKYGGFVSPTVAYSVLVVAKVEKGKSKKLKSVKELLGITIMERSSFEKNPIDFLEAKGYKEVKKDLIIKLPKYSLFELENGRKRMLASARELQKGNELALPSKYVNFLYLASHYEKLKGSPEDNEQKQLFVEQHKHYLDEIIEQISEFSKRVILADANLDKVLSAYNKHRDKPIREQAENIIHLFTLTNLGAPAAFKYFDTTIDRKQYRSTKEVLDATLIHQSITGLYETRIDLSQLGGDEGADKRTADGSEFESPKKKRKV

SEQ ID NO: 344 - protein, 1588 aa, synthetic construct
  REGION 1..1588: note = 04. monoABE8.1_bpNLS + Y123H polypeptide sequence
MSEVEFSHEYWMRHALTLAKRARDEREVPVGAVLVLNNRVIGEGWNRAIGLHDPTAHAEIMALRQGGLVMQNYRLIDATLYVTFEPCVMCAGAMIHSRIGRVVFGVRNAKTGAAGSLMDVLHHPGMNHRVEITEGILADECAALLCYFFRMPRQVFNAQKKAQSSTDSGGSSGGSSGSETPGTSESATPESSGGSSGGSDKKYSIGLAIGTNSVGWAVITDEYKVPSKKFKVLGNTDRHSIKKNLIGALLFDSGETAEATRLKRTARRRYTRRKNRICYLQEIFSNEMAKVDDSFFHRLEESFLVEEDKKHERHPIFGNIVDEVAYHEKYPTIYHLRKKLVDSTDKADLRLIYLALAHMIKFRGHFLIEGDLNPDNSDVDKLFIQLVQTYNQLFEENPINASGVDAKAILSARLSKSRRLENLIAQLPGEKKNGLFGNLIALSLGLTPNFKSNFDLAEDAKLQLSKDTYDDDLDNLLAQIGDQYADLFLAAKNLSDAILLSDILRVNTEITKAPLSASMIKRYDEHHQDLTLLKALVRQQLPEKYKEIFFDQSKNGYAGYIDGGASQEEFYKFIKPILEKMDGTEELLVKLNREDLLRKQRTFDNGSIPHQIHLGELHAILRRQEDFYPFLKDNREKIEKILTFRIPYYVGPLARGNSRFAWMTRKSEETITPWNFEEVVDKGASAQSFIERMTNFDKNLPNEKVLPKHSLLYEYFTVYNELTKVKYVTEGMRKPAFLSGEQKKAIVDLLFKTNRKVTVKQLKEDYFKKIECFDSVEISGVEDRFNASLGTYHDLLKIIKDKDFLDNEENEDILEDIVLTLTLFEDREMIEERLKTYAHLFDDKVMKQLKRRRYTGWGRLSRKLINGIRDKQSGKTILDFLKSDGFANRNFMQLIHDDSLTFKEDIQKAQVSGQGDSLHEHIANLAGSPAIKKGILQTVKVVDELVKVMGRHKPENIVIEMARENQTTQKGQKNSRERMKRIEEGIKELGSQILKEHPVENTQLQNEKLYLYYLQNGRDMYVDQELDINRLSDYDVDHIVPQSFLKDDSIDNKVLTRSDKNRGKSDNVPSEEVVKKMKNYWRQLLNAKLITQRKFDNLTKAERGGLSELDKAGFIKRQLVETRQITKHVAQILDSRMNTKYDENDKLIREVKVITLKSKLVSDFRKDFQFYKVREINNYHHAHDAYLNAVVGTALIKKYPKLESEFVYGDYKVYDVRKMIAKSEQEIGKATAKYFFYSNIMNFFKTEITLANGEIRKRPLIETNGETGEIVWDKGRDFATVRKVLSMPQVNIVKKTEVQTGGFSKESILPKRNSDKLIARKKDWDPKKYGGFVSPTVAYSVLVVAKVEKGKSKKLKSVKELLGITIMERSSFEKNPIDFLEAKGYKEVKKDLIIKLPKYSLFELENGRKRMLASARELQKGNELALPSKYVNFLYLASHYEKLKGSPEDNEQKQLFVEQHKHYLDEIIEQISEFSKRVILADANLDKVLSAYNKHRDKPIREQAENIIHLFTLTNLGAPAAFKYFDTTIDRKQYRSTKEVLDATLIHQSITGLYETRIDLSQLGGDEGADKRTADGSEFESPKKKRKV

SEQ ID NO: 345 - protein, 1588 aa, synthetic construct
  REGION 1..1588: note = 05. monoABE8.1_bpNLS + V82S polypeptide sequence
MSEVEFSHEYWMRHALTLAKRARDEREVPVGAVLVLNNRVIGEGWNRAIGLHDPTAHAEIMALRQGGLVMQNYRLIDATLYSTFEPCVMCAGAMIHSRIGRVVFGVRNAKTGAAGSLMDVLHYPGMNHRVEITEGILADECAALLCYFFRMPRQVFNAQKKAQSSTDSGGSSGGSSGSETPGTSESATPESSGGSSGGSDKKYSIGLAIGTNSVGWAVITDEYKVPSKKFKVLGNTDRHSIKKNLIGALLFDSGETAEATRLKRTARRRYTRRKNRICYLQEIFSNEMAKVDDSFFHRLEESFLVEEDKKHERHPIFGNIVDEVAYHEKYPTIYHLRKKLVDSTDKADLRLIYLALAHMIKFRGHFLIEGDLNPDNSDVDKLFIQLVQTYNQLFEENPINASGVDAKAILSARLSKSRRLENLIAQLPGEKKNGLFGNLIALSLGLTPNFKSNFDLAEDAKLQLSKDTYDDDLDNLLAQIGDQYADLFLAAKNLSDAILLSDILRVNTEITKAPLSASMIKRYDEHHQDLTLLKALVRQQLPEKYKEIFFDQSKNGYAGYIDGGASQEEFYKFIKPILEKMDGTEELLVKLNREDLLRKQRTFDNGSIPHQIHLGELHAILRRQEDFYPFLKDNREKIEKILTFRIPYYVGPLARGNSRFAWMTRKSEETITPWNFEEVVDKGASAQSFIERMTNFDKNLPNEKVLPKHSLLYEYFTVYNELTKVKYVTEGMRKPAFLSGEQKKAIVDLLFKTNRKVTVKQLKEDYFKKIECFDSVEISGVEDRFNASLGTYHDLLKIIKDKDFLDNEENEDILEDIVLTLTLFEDREMIEERLKTYAHLFDDKVMKQLKRRRYTGWGRLSRKLINGIRDKQSGKTILDFLKSDGFANRNFMQLIHDDSLTFKEDIQKAQVSGQGDSLHEHIANLAGSPAIKKGILQTVKVVDELVKVMGRHKPENIVIEMARENQTTQKGQKNSRERMKRIEEGIKELGSQILKEHPVENTQLQNEKLYLYYLQNGRDMYVDQELDINRLSDYDVDHIVPQSFLKDDSIDNKVLTRSDKNRGKSDNVPSEEVVKKMKNYWRQLLNAKLITQRKFDNLTKAERGGLSELDKAGFIKRQLVETRQITKHVAQILDSRMNTKYDENDKLIREVKVITLKSKLVSDFRKDFQFYKVREINNYHHAHDAYLNAVVGTALIKKYPKLESEFVYGDYKVYDVRKMIAKSEQEIGKATAKYFFYSNIMNFFKTEITLANGEIRKRPLIETNGETGEIVWDKGRDFATVRKVLSMPQVNIVKKTEVQTGGFSKESILPKRNSDKLIARKKDWDPKKYGGFVSPTVAYSVLVVAKVEKGKSKKLKSVKELLGITIMERSSFEKNPIDFLEAKGYKEVKKDLIIKLPKYSLFELENGRKRMLASARELQKGNELALPSKYVNFLYLASHYEKLKGSPEDNEQKQLFVEQHKHYLDEIIEQISEFSKRVILADANLDKVLSAYNKHRDKPIREQAENIIHLFTLTNLGAPAAFKYFDTTIDRKQYRSTKEVLDATLIHQSITGLYETRIDLSQLGGDEGADKRTADGSEFESPKKKRKV

SEQ ID NO: 346 - protein, 1588 aa, synthetic construct
  REGION 1..1588: note = 06. monoABE8.1_bpNLS + T166R polypeptide sequence
MSEVEFSHEYWMRHALTLAKRARDEREVPVGAVLVLNNRVIGEGWNRAIGLHDPTAHAEIMALRQGGLVMQNYRLIDATLYVTFEPCVMCAGAMIHSRIGRVVFGVRNAKTGAAGSLMDVLHYPGMNHRVEITEGILADECAALLCYFFRMPRQVFNAQKKAQSSRDSGGSSGGSSGSETPGTSESATPESSGGSSGGSDKKYSIGLAIGTNSVGWAVITDEYKVPSKKFKVLGNTDRHSIKKNLIGALLFDSGETAEATRLKRTARRRYTRRKNRICYLQEIFSNEMAKVDDSFFHRLEESFLVEEDKKHERHPIFGNIVDEVAYHEKYPTIYHLRKKLVDSTDKADLRLIYLALAHMIKFRGHFLIEGDLNPDNSDVDKLFIQLVQTYNQLFEENPINASGVDAKAILSARLSKSRRLENLIAQLPGEKKNGLFGNLIALSLGLTPNFKSNFDLAEDAKLQLSKDTYDDDLDNLLAQIGDQYADLFLAAKNLSDAILLSDILRVNTEITKAPLSASMIKRYDEHHQDLTLLKALVRQQLPEKYKEIFFDQSKNGYAGYIDGGASQEEFYKFIKPILEKMDGTEELLVKLNREDLLRKQRTFDNGSIPHQIHLGELHAILRRQEDFYPFLKDNREKIEKILTFRIPYYVGPLARGNSRFAWMTRKSEETITPWNFEEVVDKGASAQSFIERMTNFDKNLPNEKVLPKHSLLYEYFTVYNELTKVKYVTEGMRKPAFLSGEQKKAIVDLLFKTNRKVTVKQLKEDYFKKIECFDSVEISGVEDRFNASLGTYHDLLKIIKDKDFLDNEENEDILEDIVLTLTLFEDREMIEERLKTYAHLFDDKVMKQLKRRRYTGWGRLSRKLINGIRDKQSGKTILDFLKSDGFANRNFMQLIHDDSLTFKEDIQKAQVSGQGDSLHEHIANLAGSPAIKKGILQTVKVVDELVKVMGRHKPENIVIEMARENQTTQKGQKNSRERMKRIEEGIKELGSQILKEHPVENTQLQNEKLYLYYLQNGRDMYVDQELDINRLSDYDVDHIVPQSFLKDDSIDNKVLTRSDKNRGKSDNVPSEEVVKKMKNYWRQLLNAKLITQRKFDNLTKAERGGLSELDKAGFIKRQLVETRQITKHVAQILDSRMNTKYDENDKLIREVKVITLKSKLVSDFRKDFQFYKVREINNYHHAHDAYLNAVVGTALIKKYPKLESEFVYGDYKVYDVRKMIAKSEQEIGKATAKYFFYSNIMNFFKTEITLANGEIRKRPLIETNGETGEIVWDKGRDFATVRKVLSMPQVNIVKKTEVQTGGFSKESILPKRNSDKLIARKKDWDPKKYGGFVSPTVAYSVLVVAKVEKGKSKKLKSVKELLGITIMERSSFEKNPIDFLEAKGYKEVKKDLIIKLPKYSLFELENGRKRMLASARELQKGNELALPSKYVNFLYLASHYEKLKGSPEDNEQKQLFVEQHKHYLDEIIEQISEFSKRVILADANLDKVLSAYNKHRDKPIREQAENIIHLFTLTNLGAPAAFKYFDTTIDRKQYRSTKEVLDATLIHQSITGLYETRIDLSQLGGDEGADKRTADGSEFESPKKKRKV

SEQ ID NO: 347 - protein, 1588 aa, synthetic construct
  REGION 1..1588: note = 07. monoABE8.1_bpNLS + Q154R polypeptide sequence
MSEVEFSHEYWMRHALTLAKRARDEREVPVGAVLVLNNRVIGEGWNRAIGLHDPTAHAEIMALRQGGLVMQNYRLIDATLYVTFEPCVMCAGAMIHSRIGRVVFGVRNAKTGAAGSLMDVLHYPGMNHRVEITEGILADECAALLCYFFRMPRRVFNAQKKAQSSTDSGGSSGGSSGSETPGTSESATPESSGGSSGGSDKKYSIGLAIGTNSVGWAVITDEYKVPSKKFKVLGNTDRHSIKKNLIGALLFDSGETAEATRLKRTARRRYTRRKNRICYLQEIFSNEMAKVDDSFFHRLEESFLVEEDKKHERHPIFGNIVDEVAYHEKYPTIYHLRKKLVDSTDKADLRLIYLALAHMIKFRGHFLIEGDLNPDNSDVDKLFIQLVQTYNQLFEENPINASGVDAKAILSARLSKSRRLENLIAQLPGEKKNGLFGNLIALSLGLTPNFKSNFDLAEDAKLQLSKDTYDDDLDNLLAQIGDQYADLFLAAKNLSDAILLSDILRVNTEITKAPLSASMIKRYDEHHQDLTLLKALVRQQLPEKYKEIFFDQSKNGYAGYIDGGASQEEFYKFIKPILEKMDGTEELLVKLNREDLLRKQRTFDNGSIPHQIHLGELHAILRRQEDFYPFLKDNREKIEKILTFRIPYYVGPLARGNSRFAWMTRKSEETITPWNFEEVVDKGASAQSFIERMTNFDKNLPNEKVLPKHSLLYEYFTVYNELTKVKYVTEGMRKPAFLSGEQKKAIVDLLFKTNRKVTVKQLKEDYFKKIECFDSVEISGVEDRFNASLGTYHDLLKIIKDKDFLDNEENEDILEDIVLTLTLFEDREMIEERLKTYAHLFDDKVMKQLKRRRYTGWGRLSRKLINGIRDKQSGKTILDFLKSDGFANRNFMQLIHDDSLTFKEDIQKAQVSGQGDSLHEHIANLAGSPAIKKGILQTVKVVDELVKVMGRHKPENIVIEMARENQTTQKGQKNSRERMKRIEEGIKELGSQILKEHPVENTQLQNEKLYLYYLQNGRDMYVDQELDINRLSDYDVDHIVPQSFLKDDSIDNKVLTRSDKNRGKSDNVPSEEVVKKMKNYWRQLLNAKLITQRKFDNLTKAERGGLSELDKAGFIKRQLVETRQITKHVAQILDSRMNTKYDENDKLIREVKVITLKSKLVSDFRKDFQFYKVREINNYHHAHDAYLNAVVGTALIKKYPKLESEFVYGDYKVYDVRKMIAKSEQEIGKATAKYFFYSNIMNFFKTEITLANGEIRKRPLIETNGETGEIVWDKGRDFATVRKVLSMPQVNIVKKTEVQTGGFSKESILPKRNSDKLIARKKDWDPKKYGGFVSPTVAYSVLVVAKVEKGKSKKLKSVKELLGITIMERSSFEKNPIDFLEAKGYKEVKKDLIIKLPKYSLFELENGRKRMLASARELQKGNELALPSKYVNFLYLASHYEKLKGSPEDNEQKQLFVEQHKHYLDEIIEQISEFSKRVILADANLDKVLSAYNKHRDKPIREQAENIIHLFTLTNLGAPAAFKYFDTTIDRKQYRSTKEVLDATLIHQSITGLYETRIDLSQLGGDEGADKRTADGSEFESPKKKRKV

SEQ ID NO: 348 - protein, 1588 aa, synthetic construct
  REGION 1..1588: note = 08. monoABE8.1_bpNLS +Y147R_Q154R_Y123H polypeptide sequence
MSEVEFSHEYWMRHALTLAKRARDEREVPVGAVLVLNNRVIGEGWNRAIGLHDPTAHAEIMALRQGGLVMQNYRLIDATLYVTFEPCVMCAGAMIHSRIGRVVFGVRNAKTGAAGSLMDVLHHPGMNHRVEITEGILADECAALLCRFFRMPRRVFNAQKKAQSSTDSGGSSGGSSGSETPGTSESATPESSGGSSGGSDKKYSIGLAIGTNSVGWAVITDEYKVPSKKFKVLGNTDRHSIKKNLIGALLFDSGETAEATRLKRTARRRYTRRKNRICYLQEIFSNEMAKVDDSFFHRLEESFLVEEDKKHERHPIFGNIVDEVAYHEKYPTIYHLRKKLVDSTDKADLRLIYLALAHMIKFRGHFLIEGDLNPDNSDVDKLFIQLVQTYNQLFEENPINASGVDAKAILSARLSKSRRLENLIAQLPGEKKNGLFGNLIALSLGLTPNFKSNFDLAEDAKLQLSKDTYDDDLDNLLAQIGDQYADLFLAAKNLSDAILLSDILRVNTEITKAPLSASMIKRYDEHHQDLTLLKALVRQQLPEKYKEIFFDQSKNGYAGYIDGGASQEEFYKFIKPILEKMDGTEELLVKLNREDLLRKQRTFDNGSIPHQIHLGELHAILRRQEDFYPFLKDNREKIEKILTFRIPYYVGPLARGNSRFAWMTRKSEETITPWNFEEVVDKGASAQSFIERMTNFDKNLPNEKVLPKHSLLYEYFTVYNELTKVKYVTEGMRKPAFLSGEQKKAIVDLLFKTNRKVTVKQLKEDYFKKIECFDSVEISGVEDRFNASLGTYHDLLKIIKDKDFLDNEENEDILEDIVLTLTLFEDREMIEERLKTYAHLFDDKVMKQLKRRRYTGWGRLSRKLINGIRDKQSGKTILDFLKSDGFANRNFMQLIHDDSLTFKEDIQKAQVSGQGDSLHEHIANLAGSPAIKKGILQTVKVVDELVKVMGRHKPENIVIEMARENQTTQKGQKNSRERMKRIEEGIKELGSQILKEHPVENTQLQNEKLYLYYLQNGRDMYVDQELDINRLSDYDVDHIVPQSFLKDDSIDNKVLTRSDKNRGKSDNVPSEEVVKKMKNYWRQLLNAKLITQRKFDNLTKAERGGLSELDKAGFIKRQLVETRQITKHVAQILDSRMNTKYDENDKLIREVKVITLKSKLVSDFRKDFQFYKVREINNYHHAHDAYLNAVVGTALIKKYPKLESEFVYGDYKVYDVRKMIAKSEQEIGKATAKYFFYSNIMNFFKTEITLANGEIRKRPLIETNGETGEIVWDKGRDFATVRKVLSMPQVNIVKKTEVQTGGFSKESILPKRNSDKLIARKKDWDPKKYGGFVSPTVAYSVLVVAKVEKGKSKKLKSVKELLGITIMERSSFEKNPIDFLEAKGYKEVKKDLIIKLPKYSLFELENGRKRMLASARELQKGNELALPSKYVNFLYLASHYEKLKGSPEDNEQKQLFVEQHKHYLDEIIEQISEFSKRVILADANLDKVLSAYNKHRDKPIREQAENIIHLFTLTNLGAPAAFKYFDTTIDRKQYRSTKEVLDATLIHQSITGLYETRIDLSQLGGDEGADKRTADGSEFESPKKKRKV

SEQ ID NO: 349 - protein, 1588 aa, synthetic construct
  REGION 1..1588: note = 09. monoABE8.1_bpNLS +Y147R_Q154R_I76Y polypeptide sequence
MSEVEFSHEYWMRHALTLAKRARDEREVPVGAVLVLNNRVIGEGWNRAIGLHDPTAHAEIMALRQGGLVMQNYRLYDATLYVTFEPCVMCAGAMIHSRIGRVVFGVRNAKTGAAGSLMDVLHYPGMNHRVEITEGILADECAALLCRFFRMPRRVFNAQKKAQSSTDSGGSSGGSSGSETPGTSESATPESSGGSSGGSDKKYSIGLAIGTNSVGWAVITDEYKVPSKKFKVLGNTDRHSIKKNLIGALLFDSGETAEATRLKRTARRRYTRRKNRICYLQEIFSNEMAKVDDSFFHRLEESFLVEEDKKHERHPIFGNIVDEVAYHEKYPTIYHLRKKLVDSTDKADLRLIYLALAHMIKFRGHFLIEGDLNPDNSDVDKLFIQLVQTYNQLFEENPINASGVDAKAILSARLSKSRRLENLIAQLPGEKKNGLFGNLIALSLGLTPNFKSNFDLAEDAKLQLSKDTYDDDLDNLLAQIGDQYADLFLAAKNLSDAILLSDILRVNTEITKAPLSASMIKRYDEHHQDLTLLKALVRQQLPEKYKEIFFDQSKNGYAGYIDGGASQEEFYKFIKPILEKMDGTEELLVKLNREDLLRKQRTFDNGSIPHQIHLGELHAILRRQEDFYPFLKDNREKIEKILTFRIPYYVGPLARGNSRFAWMTRKSEETITPWNFEEVVDKGASAQSFIERMTNFDKNLPNEKVLPKHSLLYEYFTVYNELTKVKYVTEGMRKPAFLSGEQKKAIVDLLFKTNRKVTVKQLKEDYFKKIECFDSVEISGVEDRFNASLGTYHDLLKIIKDKDFLDNEENEDILEDIVLTLTLFEDREMIEERLKTYAHLFDDKVMKQLKRRRYTGWGRLSRKLINGIRDKQSGKTILDFLKSDGFANRNFMQLIHDDSLTFKEDIQKAQVSGQGDSLHEHIANLAGSPAIKKGILQTVKVVDELVKVMGRHKPENIVIEMARENQTTQKGQKNSRERMKRIEEGIKELGSQILKEHPVENTQLQNEKLYLYYLQNGRDMYVDQELDINRLSDYDVDHIVPQSFLKDDSIDNKVLTRSDKNRGKSDNVPSEEVVKKMKNYWRQLLNAKLITQRKFDNLTKAERGGLSELDKAGFIKRQLVETRQITKHVAQILDSRMNTKYDENDKLIREVKVITLKSKLVSDFRKDFQFYKVREINNYHHAHDAYLNAVVGTALIKKYPKLESEFVYGDYKVYDVRKMIAKSEQEIGKATAKYFFYSNIMNFFKTEITLANGEIRKRPLIETNGETGEIVWDKGRDFATVRKVLSMPQVNIVKKTEVQTGGFSKESILPKRNSDKLIARKKDWDPKKYGGFVSPTVAYSVLVVAKVEKGKSKKLKSVKELLGITIMERSSFEKNPIDFLEAKGYKEVKKDLIIKLPKYSLFELENGRKRMLASARELQKGNELALPSKYVNFLYLASHYEKLKGSPEDNEQKQLFVEQHKHYLDEIIEQISEFSKRVILADANLDKVLSAYNKHRDKPIREQAENIIHLFTLTNLGAPAAFKYFDTTIDRKQYRSTKEVLDATLIHQSITGLYETRIDLSQLGGDEGADKRTADGSEFESPKKKRKV

SEQ ID NO: 350 - protein, 1588 aa, synthetic construct
  REGION 1..1588: note = 10. monoABE8.1_bpNLS +Y147R_Q154R_T166R polypeptide sequence
MSEVEFSHEYWMRHALTLAKRARDEREVPVGAVLVLNNRVIGEGWNRAIGLHDPTAHAEIMALRQGGLVMQNYRLIDATLYVTFEPCVMCAGAMIHSRIGRVVFGVRNAKTGAAGSLMDVLHYPGMNHRVEITEGILADECAALLCRFFRMPRRVFNAQKKAQSSRDSGGSSGGSSGSETPGTSESATPESSGGSSGGSDKKYSIGLAIGTNSVGWAVITDEYKVPSKKFKVLGNTDRHSIKKNLIGALLFDSGETAEATRLKRTARRRYTRRKNRICYLQEIFSNEMAKVDDSFFHRLEESFLVEEDKKHERHPIFGNIVDEVAYHEKYPTIYHLRKKLVDSTDKADLRLIYLALAHMIKFRGHFLIEGDLNPDNSDVDKLFIQLVQTYNQLFEENPINASGVDAKAILSARLSKSRRLENLIAQLPGEKKNGLFGNLIALSLGLTPNFKSNFDLAEDAKLQLSKDTYDDDLDNLLAQIGDQYADLFLAAKNLSDAILLSDILRVNTEITKAPLSASMIKRYDEHHQDLTLLKALVRQQLPEKYKEIFFDQSKNGYAGYIDGGASQEEFYKFIKPILEKMDGTEELLVKLNREDLLRKQRTFDNGSIPHQIHLGELHAILRRQEDFYPFLKDNREKIEKILTFRIPYYVGPLARGNSRFAWMTRKSEETITPWNFEEVVDKGASAQSFIERMTNFDKNLPNEKVLPKHSLLYEYFTVYNELTKVKYVTEGMRKPAFLSGEQKKAIVDLLFKTNRKVTVKQLKEDYFKKIECFDSVEISGVEDRFNASLGTYHDLLKIIKDKDFLDNEENEDILEDIVLTLTLFEDREMIEERLKTYAHLFDDKVMKQLKRRRYTGWGRLSRKLINGIRDKQSGKTILDFLKSDGFANRNFMQLIHDDSLTFKEDIQKAQVSGQGDSLHEHIANLAGSPAIKKGILQTVKVVDELVKVMGRHKPENIVIEMARENQTTQKGQKNSRERMKRIEEGIKELGSQILKEHPVENTQLQNEKLYLYYLQNGRDMYVDQELDINRLSDYDVDHIVPQSFLKDDSIDNKVLTRSDKNRGKSDNVPSEEVVKKMKNYWRQLLNAKLITQRKFDNLTKAERGGLSELDKAGFIKRQLVETRQITKHVAQILDSRMNTKYDENDKLIREVKVITLKSKLVSDFRKDFQFYKVREINNYHHAHDAYLNAVVGTALIKKYPKLESEFVYGDYKVYDVRKMIAKSEQEIGKATAKYFFYSNIMNFFKTEITLANGEIRKRPLIETNGETGEIVWDKGRDFATVRKVLSMPQVNIVKKTEVQTGGFSKESILPKRNSDKLIARKKDWDPKKYGGFVSPTVAYSVLVVAKVEKGKSKKLKSVKELLGITIMERSSFEKNPIDFLEAKGYKEVKKDLIIKLPKYSLFELENGRKRMLASARELQKGNELALPSKYVNFLYLASHYEKLKGSPEDNEQKQLFVEQHKHYLDEIIEQISEFSKRVILADANLDKVLSAYNKHRDKPIREQAENIIHLFTLTNLGAPAAFKYFDTTIDRKQYRSTKEVLDATLIHQSITGLYETRIDLSQLGGDEGADKRTADGSEFESPKKKRKV

SEQ ID NO: 351 - protein, 1588 aa, synthetic construct
  REGION 1..1588: note = 11. monoABE8.1_bpNLS +Y147T_Q154R polypeptide sequence
MSEVEFSHEYWMRHALTLAKRARDEREVPVGAVLVLNNRVIGEGWNRAIGLHDPTAHAEIMALRQGGLVMQNYRLIDATLYVTFEPCVMCAGAMIHSRIGRVVFGVRNAKTGAAGSLMDVLHYPGMNHRVEITEGILADECAALLCTFFRMPRRVFNAQKKAQSSTDSGGSSGGSSGSETPGTSESATPESSGGSSGGSDKKYSIGLAIGTNSVGWAVITDEYKVPSKKFKVLGNTDRHSIKKNLIGALLFDSGETAEATRLKRTARRRYTRRKNRICYLQEIFSNEMAKVDDSFFHRLEESFLVEEDKKHERHPIFGNIVDEVAYHEKYPTIYHLRKKLVDSTDKADLRLIYLALAHMIKFRGHFLIEGDLNPDNSDVDKLFIQLVQTYNQLFEENPINASGVDAKAILSARLSKSRRLENLIAQLPGEKKNGLFGNLIALSLGLTPNFKSNFDLAEDAKLQLSKDTYDDDLDNLLAQIGDQYADLFLAAKNLSDAILLSDILRVNTEITKAPLSASMIKRYDEHHQDLTLLKALVRQQLPEKYKEIFFDQSKNGYAGYIDGGASQEEFYKFIKPILEKMDGTEELLVKLNREDLLRKQRTFDNGSIPHQIHLGELHAILRRQEDFYPFLKDNREKIEKILTFRIPYYVGPLARGNSRFAWMTRKSEETITPWNFEEVVDKGASAQSFIERMTNFDKNLPNEKVLPKHSLLYEYFTVYNELTKVKYVTEGMRKPAFLSGEQKKAIVDLLFKTNRKVTVKQLKEDYFKKIECFDSVEISGVEDRFNASLGTYHDLLKIIKDKDFLDNEENEDILEDIVLTLTLFEDREMIEERLKTYAHLFDDKVMKQLKRRRYTGWGRLSRKLINGIRDKQSGKTILDFLKSDGFANRNFMQLIHDDSLTFKEDIQKAQVSGQGDSLHEHIANLAGSPAIKKGILQTVKVVDELVKVMGRHKPENIVIEMARENQTTQKGQKNSRERMKRIEEGIKELGSQILKEHPVENTQLQNEKLYLYYLQNGRDMYVDQELDINRLSDYDVDHIVPQSFLKDDSIDNKVLTRSDKNRGKSDNVPSEEVVKKMKNYWRQLLNAKLITQRKFDNLTKAERGGLSELDKAGFIKRQLVETRQITKHVAQILDSRMNTKYDENDKLIREVKVITLKSKLVSDFRKDFQFYKVREINNYHHAHDAYLNAVVGTALIKKYPKLESEFVYGDYKVYDVRKMIAKSEQEIGKATAKYFFYSNIMNFFKTEITLANGEIRKRPLIETNGETGEIVWDKGRDFATVRKVLSMPQVNIVKKTEVQTGGFSKESILPKRNSDKLIARKKDWDPKKYGGFVSPTVAYSVLVVAKVEKGKSKKLKSVKELLGITIMERSSFEKNPIDFLEAKGYKEVKKDLIIKLPKYSLFELENGRKRMLASARELQKGNELALPSKYVNFLYLASHYEKLKGSPEDNEQKQLFVEQHKHYLDEIIEQISEFSKRVILADANLDKVLSAYNKHRDKPIREQAENIIHLFTLTNLGAPAAFKYFDTTIDRKQYRSTKEVLDATLIHQSITGLYETRIDLSQLGGDEGADKRTADGSEFESPKKKRKV

SEQ ID NO: 352 - protein, 1588 aa, synthetic construct
  REGION 1..1588: note = 12. monoABE8.1_bpNLS +Y147T_Q154S polypeptide sequence
MSEVEFSHEYWMRHALTLAKRARDEREVPVGAVLVLNNRVIGEGWNRAIGLHDPTAHAEIMALRQGGLVMQNYRLIDATLYVTFEPCVMCAGAMIHSRIGRVVFGVRNAKTGAAGSLMDVLHYPGMNHRVEITEGILADECAALLCTFFRMPRSVFNAQKKAQSSTDSGGSSGGSSGSETPGTSESATPESSGGSSGGSDKKYSIGLAIGTNSVGWAVITDEYKVPSKKFKVLGNTDRHSIKKNLIGALLFDSGETAEATRLKRTARRRYTRRKNRICYLQEIFSNEMAKVDDSFFHRLEESFLVEEDKKHERHPIFGNIVDEVAYHEKYPTIYHLRKKLVDSTDKADLRLIYLALAHMIKFRGHFLIEGDLNPDNSDVDKLFIQLVQTYNQLFEENPINASGVDAKAILSARLSKSRRLENLIAQLPGEKKNGLFGNLIALSLGLTPNFKSNFDLAEDAKLQLSKDTYDDDLDNLLAQIGDQYADLFLAAKNLSDAILLSDILRVNTEITKAPLSASMIKRYDEHHQDLTLLKALVRQQLPEKYKEIFFDQSKNGYAGYIDGGASQEEFYKFIKPILEKMDGTEELLVKLNREDLLRKQRTFDNGSIPHQIHLGELHAILRRQEDFYPFLKDNREKIEKILTFRIPYYVGPLARGNSRFAWMTRKSEETITPWNFEEVVDKGASAQSFIERMTNFDKNLPNEKVLPKHSLLYEYFTVYNELTKVKYVTEGMRKPAFLSGEQKKAIVDLLFKTNRKVTVKQLKEDYFKKIECFDSVEISGVEDRFNASLGTYHDLLKIIKDKDFLDNEENEDILEDIVLTLTLFEDREMIEERLKTYAHLFDDKVMKQLKRRRYTGWGRLSRKLINGIRDKQSGKTILDFLKSDGFANRNFMQLIHDDSLTFKEDIQKAQVSGQGDSLHEHIANLAGSPAIKKGILQTVKVVDELVKVMGRHKPENIVIEMARENQTTQKGQKNSRERMKRIEEGIKELGSQILKEHPVENTQLQNEKLYLYYLQNGRDMYVDQELDINRLSDYDVDHIVPQSFLKDDSIDNKVLTRSDKNRGKSDNVPSEEVVKKMKNYWRQLLNAKLITQRKFDNLTKAERGGLSELDKAGFIKRQLVETRQITKHVAQILDSRMNTKYDENDKLIREVKVITLKSKLVSDFRKDFQFYKVREINNYHHAHDAYLNAVVGTALIKKYPKLESEFVYGDYKVYDVRKMIAKSEQEIGKATAKYFFYSNIMNFFKTEITLANGEIRKRPLIETNGETGEIVWDKGRDFATVRKVLSMPQVNIVKKTEVQTGGFSKESILPKRNSDKLIARKKDWDPKKYGGFVSPTVAYSVLVVAKVEKGKSKKLKSVKELLGITIMERSSFEKNPIDFLEAKGYKEVKKDLIIKLPKYSLFELENGRKRMLASARELQKGNELALPSKYVNFLYLASHYEKLKGSPEDNEQKQLFVEQHKHYLDEIIEQISEFSKRVILADANLDKVLSAYNKHRDKPIREQAENIIHLFTLTNLGAPAAFKYFDTTIDRKQYRSTKEVLDATLIHQSITGLYETRIDLSQLGGDEGADKRTADGSEFESPKKKRKV

SEQ ID NO: 353 - protein, 1588 aa, synthetic construct
  REGION 1..1588: note = 13. monoABE8.1_bpNLS +H123Y123H_Y147R_Q154R_I76Y polypeptide sequence
MSEVEFSHEYWMRHALTLAKRARDEREVPVGAVLVLNNRVIGEGWNRAIGLHDPTAHAEIMALRQGGLVMQNYRLYDATLYVTFEPCVMCAGAMIHSRIGRVVFGVRNAKTGAAGSLMDVLHHPGMNHRVEITEGILADECAALLCRFFRMPRRVFNAQKKAQSSTDSGGSSGGSSGSETPGTSESATPESSGGSSGGSDKKYSIGLAIGTNSVGWAVITDEYKVPSKKFKVLGNTDRHSIKKNLIGALLFDSGETAEATRLKRTARRRYTRRKNRICYLQEIFSNEMAKVDDSFFHRLEESFLVEEDKKHERHPIFGNIVDEVAYHEKYPTIYHLRKKLVDSTDKADLRLIYLALAHMIKFRGHFLIEGDLNPDNSDVDKLFIQLVQTYNQLFEENPINASGVDAKAILSARLSKSRRLENLIAQLPGEKKNGLFGNLIALSLGLTPNFKSNFDLAEDAKLQLSKDTYDDDLDNLLAQIGDQYADLFLAAKNLSDAILLSDILRVNTEITKAPLSASMIKRYDEHHQDLTLLKALVRQQLPEKYKEIFFDQSKNGYAGYIDGGASQEEFYKFIKPILEKMDGTEELLVKLNREDLLRKQRTFDNGSIPHQIHLGELHAILRRQEDFYPFLKDNREKIEKILTFRIPYYVGPLARGNSRFAWMTRKSEETITPWNFEEVVDKGASAQSFIERMTNFDKNLPNEKVLPKHSLLYEYFTVYNELTKVKYVTEGMRKPAFLSGEQKKAIVDLLFKTNRKVTVKQLKEDYFKKIECFDSVEISGVEDRFNASLGTYHDLLKIIKDKDFLDNEENEDILEDIVLTLTLFEDREMIEERLKTYAHLFDDKVMKQLKRRRYTGWGRLSRKLINGIRDKQSGKTILDFLKSDGFANRNFMQLIHDDSLTFKEDIQKAQVSGQGDSLHEHIANLAGSPAIKKGILQTVKVVDELVKVMGRHKPENIVIEMARENQTTQKGQKNSRERMKRIEEGIKELGSQILKEHPVENTQLQNEKLYLYYLQNGRDMYVDQELDINRLSDYDVDHIVPQSFLKDDSIDNKVLTRSDKNRGKSDNVPSEEVVKKMKNYWRQLLNAKLITQRKFDNLTKAERGGLSELDKAGFIKRQLVETRQITKHVAQILDSRMNTKYDENDKLIREVKVITLKSKLVSDFRKDFQFYKVREINNYHHAHDAYLNAVVGTALIKKYPKLESEFVYGDYKVYDVRKMIAKSEQEIGKATAKYFFYSNIMNFFKTEITLANGEIRKRPLIETNGETGEIVWDKGRDFATVRKVLSMPQVNIVKKTEVQTGGFSKESILPKRNSDKLIARKKDWDPKKYGGFVSPTVAYSVLVVAKVEKGKSKKLKSVKELLGITIMERSSFEKNPIDFLEAKGYKEVKKDLIIKLPKYSLFELENGRKRMLASARELQKGNELALPSKYVNFLYLASHYEKLKGSPEDNEQKQLFVEQHKHYLDEIIEQISEFSKRVILADANLDKVLSAYNKHRDKPIREQAENIIHLFTLTNLGAPAAFKYFDTTIDRKQYRSTKEVLDATLIHQSITGLYETRIDLSQLGGDEGADKRTADGSEFESPKKKRKV

SEQ ID NO: 354 - protein, 1588 aa, synthetic construct
  REGION 1..1588: note = 14. monoABE8.1_bpNLS + V82S +Q154R polypeptide sequence
MSEVEFSHEYWMRHALTLAKRARDEREVPVGAVLVLNNRVIGEGWNRAIGLHDPTAHAEIMALRQGGLVMQNYRLIDATLYSTFEPCVMCAGAMIHSRIGRVVFGVRNAKTGAAGSLMDVLHYPGMNHRVEITEGILADECAALLCYFFRMPRRVFNAQKKAQSSTDSGGSSGGSSGSETPGTSESATPESSGGSSGGSDKKYSIGLAIGTNSVGWAVITDEYKVPSKKFKVLGNTDRHSIKKNLIGALLFDSGETAEATRLKRTARRRYTRRKNRICYLQEIFSNEMAKVDDSFFHRLEESFLVEEDKKHERHPIFGNIVDEVAYHEKYPTIYHLRKKLVDSTDKADLRLIYLALAHMIKFRGHFLIEGDLNPDNSDVDKLFIQLVQTYNQLFEENPINASGVDAKAILSARLSKSRRLENLIAQLPGEKKNGLFGNLIALSLGLTPNFKSNFDLAEDAKLQLSKDTYDDDLDNLLAQIGDQYADLFLAAKNLSDAILLSDILRVNTEITKAPLSASMIKRYDEHHQDLTLLKALVRQQLPEKYKEIFFDQSKNGYAGYIDGGASQEEFYKFIKPILEKMDGTEELLVKLNREDLLRKQRTFDNGSIPHQIHLGELHAILRRQEDFYPFLKDNREKIEKILTFRIPYYVGPLARGNSRFAWMTRKSEETITPWNFEEVVDKGASAQSFIERMTNFDKNLPNEKVLPKHSLLYEYFTVYNELTKVKYVTEGMRKPAFLSGEQKKAIVDLLFKTNRKVTVKQLKEDYFKKIECFDSVEISGVEDRFNASLGTYHDLLKIIKDKDFLDNEENEDILEDIVLTLTLFEDREMIEERLKTYAHLFDDKVMKQLKRRRYTGWGRLSRKLINGIRDKQSGKTILDFLKSDGFANRNFMQLIHDDSLTFKEDIQKAQVSGQGDSLHEHIANLAGSPAIKKGILQTVKVVDELVKVMGRHKPENIVIEMARENQTTQKGQKNSRERMKRIEEGIKELGSQILKEHPVENTQLQNEKLYLYYLQNGRDMYVDQELDINRLSDYDVDHIVPQSFLKDDSIDNKVLTRSDKNRGKSDNVPSEEVVKKMKNYWRQLLNAKLITQRKFDNLTKAERGGLSELDKAGFIKRQLVETRQITKHVAQILDSRMNTKYDENDKLIREVKVITLKSKLVSDFRKDFQFYKVREINNYHHAHDAYLNAVVGTALIKKYPKLESEFVYGDYKVYDVRKMIAKSEQEIGKATAKYFFYSNIMNFFKTEITLANGEIRKRPLIETNGETGEIVWDKGRDFATVRKVLSMPQVNIVKKTEVQTGGFSKESILPKRNSDKLIARKKDWDPKKYGGFVSPTVAYSVLVVAKVEKGKSKKLKSVKELLGITIMERSSFEKNPIDFLEAKGYKEVKKDLIIKLPKYSLFELENGRKRMLASARELQKGNELALPSKYVNFLYLASHYEKLKGSPEDNEQKQLFVEQHKHYLDEIIEQISEFSKRVILADANLDKVLSAYNKHRDKPIREQAENIIHLFTLTNLGAPAAFKYFDTTIDRKQYRSTKEVLDATLIHQSITGLYETRIDLSQLGGDEGADKRTADGSEFESPKKKRKV

SEQ ID NO: 355 - protein, 4 aa, synthetic construct
  REGION 1..4: note = synthetic peptide sequence
SGGS

SEQ ID NO: 356 - protein, 24 aa, synthetic construct
  REGION 1..24: note = synthetic peptide sequence
SGGSSGSETPGTSESATPESSGGS

SEQ ID NO: 357 - protein, 32 aa, synthetic construct
  REGION 1..32: note = synthetic polypeptide sequence
SGGSSGGSSGSETPGTSESATPESSGGSSGGS

SEQ ID NO: 358 - protein, 104 aa, synthetic construct
  REGION 1..104: note = synthetic polypeptide sequence
GGSGGSPGSPAGSPTSTEEGTSESATPESGPGTSTEPSEGSAPGSPAGSPTSTEEGTSTEPSEGSAPGTSTEPSEGSAPGTSESATPESGPGSEPATSGGSGGS

SEQ ID NO: 359 - protein, 24 aa, synthetic construct
  REGION 1..24: note = synthetic peptide sequence
SGGSSGGSSGSETPGTSESATPES

SEQ ID NO: 360 - protein, 40 aa, synthetic construct
  REGION 1..40: note = synthetic polypeptide sequence
SGGSSGGSSGSETPGTSESATPESSGGSSGGSSGGSSGGS

SEQ ID NO: 361 - protein, 64 aa, synthetic construct
  REGION 1..64: note = synthetic polypeptide sequence
SGGSSGGSSGSETPGTSESATPESSGGSSGGSSGGSSGGSSGSETPGTSESATPESSGGSSGGS

SEQ ID NO: 362 - protein, 92 aa, synthetic construct
  REGION 1..92: note = synthetic polypeptide sequence
PGSPAGSPTSTEEGTSESATPESGPGTSTEPSEGSAPGSPAGSPTSTEEGTSTEPSEGSAPGTSTEPSEGSAPGTSESATPESGPGSEPATS

SEQ ID NO: 363 - protein, 5 aa, synthetic construct
  REGION 1..5: note = synthetic peptide sequence
PAPAP

SEQ ID NO: 364 - protein, 6 aa, synthetic construct
  REGION 1..6: note = synthetic peptide sequence
PAPAPA

SEQ ID NO: 365 - protein, 7 aa, synthetic construct
  REGION 1..7: note = synthetic peptide sequence
PAPAPAP

SEQ ID NO: 366 - protein, 8 aa, synthetic construct
  REGION 1..8: note = synthetic peptide sequence
PAPAPAPA

SEQ ID NO: 367 - protein, 9 aa, synthetic construct
  REGION 1..9: note = synthetic peptide sequence
PAPAPAPAP

SEQ ID NO: 368 - protein, 15 aa, synthetic construct
  REGION 1..15: note = synthetic peptide sequence
PAPAPAPAPAPAPAP

SEQ ID NO: 369 - protein, 21 aa, synthetic construct
  REGION 1..21: note = synthetic peptide sequence
PAPAPAPAPAPAPAPAPAPAP

SEQ ID NO: 370 - DNA, 306 bp, synthetic construct
  misc_feature 1..306: note = DnaE Intein-N polynucleotide sequence
  source 1..306: mol_type = other DNA
tgcctgtcatacgaaaccgagatactgacagtagaatatggccttctgccaatcgggaagattgtggagaaacggatagaatgcacagtttactctgtcgataacaatggtaacatttatactcagccagttgcccagtggcacgaccggggagagcaggaagtattcgaatactgtctggaggatggaagtctcattagggccactaaggaccacaaatttatgacagtcgatggccagatgctgcctatagacgaaatctttgagcgagagttggacctcatgcgagttgacaaccttcctaat

SEQ ID NO: 371 - protein, 102 aa, synthetic construct
  REGION 1..102: note = DnaE Intein-N polypeptide sequence
CLSYETEILTVEYGLLPIGKIVEKRIECTVYSVDNNGNIYTQPVAQWHDRGEQEVFEYCLEDGSLIRATKDHKFMTVDGQMLPIDEIFERELDLMRVDNLPN

SEQ ID NO: 372 - DNA, 108 bp, synthetic construct
  misc_feature 1..108: note = DnaE Intein-C polynucleotide sequence
  source 1..108: mol_type = other DNA
atgatcaagatagctacaaggaagtatcttggcaaacaaaacgtttatgatattggagtcgaaagagatcacaactttgctctgaagaacggattcatagcttctaat

SEQ ID NO: 373 - protein, 36 aa, synthetic construct
  REGION 1..36: note = DnaE Intein-C polypeptide sequence
MIKIATRKYLGKQNVYDIGVERDHNFALKNGFIASN

SEQ ID NO: 374 - DNA, 303 bp, synthetic construct
  misc_feature 1..303: note = Cfa-N polynucleotide sequence
  source 1..303: mol_type = other DNA
tgcctgtcttatgataccgagatacttaccgttgaatatggcttcttgcctattggaaagattgtcgaagagagaattgaatgcacagtatatactgtagacaagaatggtttcgtttacacacagcccattgctcaatggcacaatcgcggcgaacaagaagtatttgagtactgtctcgaggatggaagcatcatacgagcaactaaagatcataaattcatgaccactgacgggcagatgttgccaatagatgagatattcgagcggggcttggatctcaaacaagtggatggattgcca

SEQ ID NO: 375 - protein, 101 aa, synthetic construct
  REGION 1..101: note = Cfa-N polypeptide sequence
CLSYDTEILTVEYGFLPIGKIVEERIECTVYTVDKNGFVYTQPIAQWHNRGEQEVFEYCLEDGSIIRATKDHKFMTTDGQMLPIDEIFERGLDLKQVDGLP

SEQ ID NO: 376 - DNA, 159 bp, synthetic construct
  misc_feature 1..159: note = Cfa-C polynucleotide sequence
  source 1..159: mol_type = other DNA
atgaagaggactgccgatggatcagagtttgaatctcccaagaagaagaggaaagtaaagataatatctcgaaaaagtcttggtacccaaaatgtctatgatattggagtggagaaagatcacaacttccttctcaagaacggtctcgtagccagcaac

SEQ ID NO: 377 - protein, 53 aa, synthetic construct
  REGION 1..53: note = Cfa-C polypeptide sequence
MKRTADGSEFESPKKKRKVKIISRKSLGTQNVYDIGVEKDHNFLLKNGLVASN

SEQ ID NO: 378 - protein, 638 aa, Homo sapiens
MILFKQATYFISLFATVSCGCLTQLYENAFFRGGDVASMYTPNAQYCQMRCTFHPRCLLFSFLPASSINDMEKRFGCFLKDSVTGTLPKVHRTGAVSGHSLKQCGHQISACHRDIYKGVDMRGVNFNVSKVSSVEECQKRCTSNIRCQFFSYATQTFHKAEYRNNCLLKYSPGGTPTAIKVLSNVESGFSLKPCALSEIGCHMNIFQHLAFSDVDVARVLTPDAFVCRTICTYHPNCLFFTFYTNVWKIESQRNVCLLKTSESGTPSSSTPQENTISGYSLLTCKRTLPEPCHSKIYPGVDFGGEELNVTFVKGVNVCQETCTKMIRCQFFTYSLLPEDCKEEKCKCFLRLSMDGSPTRIAYGTQGSSGYSLRLCNTGDNSVCTTKTSTRIVGGTNSSWGEWPWQVSLQVKLTAQRHLCGGSLIGHQWVLTAAHCFDGLPLQDVWRIYSGILNLSDITKDTPFSQIKEIIIHQNYKVSEGNHDIALIKLQAPLNYTEFQKPICLPSKGDTSTIYTNCWVTGWGFSKEKGEIQNILQKVNIPLVTNEECQKRYQDYKITQRMVCAGYKEGGKDACKGDSGGPLVCKHNGMWRLVGITSWGEGCARREQPGVYTKVAEYMDWILEKTQSSDGKAQMQSPA

SEQ ID NO: 379 - DNA, 30965 bp, Homo sapiens
  source 1..30965: mol_type = genomic DNA
agtgccacattagaacagcttgaagaccgttcatttttaagtgacaagagactcacctccaagaagcaattgtgttttcaggtagcaaatttttattattctgattgtttccaaataaactataatttttaagtataattttttactttatgagaaaattaatcatttatattctaatttcctgagtatgtagagagtatagataatgttcctttatgtagaaatatttaaatgtaagatgattttaaatcagaaagaatatttgattgatttaaaatttttaaatgggctttaatattttcagaggttttctttacttagggatttttggactgacattattgccattatttattaattttgtttttgcccaaatcaagaggtttcataattgtttactctctctctaccaattccctttccaacattactagccacagagttggccaatgaacaataaacacaacagtagtctggaggtctcaatttgtatcttgggaagcattataaattttccaactccctagacacaaatgtaccaaaaaaaaacccttgttttctataccagtaattgtgtgctttgtcttgcaattcagacatttacaagaaaatctaaatcaccttaaattaagatttatgttaaatgtggtctaaaaccagcagagttatgtattgttttcttttttagaatgattttattcaagcaagcaacttatttcatttccttgtttgctacagtttcctgtggtaagtgaattatctataaaacatggaattcaggctaagacaggagtagccaagcaagtggcaccacccctggagaaagctattgaacatacagcttcgggggtggagattgtccctgatgattcaggacacgtgtctatttaatgttccacaacaaggaccacttgtcaggtatattgctgtagacatatgttgcagaccagaggaaggagctcagaagtaggaatgtcttgggacttgtgttaacaaaaacttctgttcgcagatgacactctgcaaagcaaaacttgaaacaaaaaaaaattagtcctctatttttattatcaacagtaaaaaattaaactttatctgaaaattcaaaagagtgctaggcattttatagtgtctgggtccaatccaagtatctgttaggaacaccatacatagttttactctggaccgctagggaaccatttcaaaaatgaaagtaactggtttaaatttaacttagcaaaccatgcatttggatagttctaggtgaatagctttcaacaccagatttagatctcatttctctattaatttcattaatttttggagaataaaaatgattctggacatttcattaatcattacagagggagttttctctgtgtccccacaaggcatgattctgggtctatggtgacttaagagggccacacaacaatgagtatttaattttcctcagatgtatggctacaataaacatctataggtaaggtttacattcataaagagacctttttttttccaggaaaaaagacttttattccccctaaatcacaactcccctgtgtctgtccctcaaccctgatttctcttctaaaccgtaatttacaaacccatgtgcaaacccactgaaaggtgagaaggagcataagccagagacactgggaaccacagccaactacagggggtttttcatttttttgttttgttttgttttttggcaaaataaatcatgattatggctaggaaaatcagggatgtaagtaagcaaaaatttagaaactacatattgcatgtagtccccaaattcagaaacagtcatcgttaaacatcttttatttagtctttcagatatttttctacatatacctatttgcacatttcacaaaaaagagttattaactgtggacactctttgacttgcattttccacttatagctatcttttggtgcaaataagtaatatattttggagcttgctattcttctctttttatggtatttttgtgtgcacattcttatgctcttattcagttatttctgtagaatacaatttttgaaataaaaatactagattcaaaggtgtgaatatttttgaaggttttgtggtgtggtatcatgaaattaggtttcagaaagtttactccatagttgactttttctaccagctaataagagtgctcatttaccccacttaggccaactctaacaggcttctgttgctttgcatcctgacatatttatctttctggaaacagtgtcctaatttatttctgcagagctactgcctctcagttttggtccatgtggttctggtgaccctgattcttctgctgaaccagaaagtgcacacatcctcctggctgtggtgacccaatcagagccaacgtcttgcaatgaagcttttctttagacatctagaaataagactcttatgttttttttttccaatttgacttgaaacttaagacaatacacaggcctgagttgttggtactattttgctactacgtggagcttgagagtaatggtaacaccaagactggagcaagtggaaggagacatattgtccactgatgctatcagttgagcacaatgtgcagttactttttaagccagattcaccatgggctttttggctcctgaaccaatagatttcatttgttttcaagccactttgtactaggttttccatcatttgcaatcaaaaccagtatacaaacactggttatttaatttttcatttttgctaatctcagggataaaatggcttctagttgttttaacttggctatatttgtgattcttcccattttcatatacttactaatcacttctatttcttttgtaaattatcttttcatatttgttatctaattctttaaaatttgagtactttaattctcattattgtttgtggaattgttaaacaagactgaataatctgcccaaagtccatggacatgggggcccatgtaaaagctttgaaagccaccatcattatgagataaattatataatagtactttacataggctccaaaatacagcacagacacagctatcattgtcatggtcatcattatcatcatgatcaccaacttatgaggataagcaagaacacctactagaagtttctttccattcagcaacaaaattggtgtctttctagtcactcccttccctgactgtcacatagcagttcacagaggctcagttgcagaatgagaagctctgggccaggacctgccattgtatgcatccttgcatgggaactgggggctggaagaggagtgactgcttgataattatgagtcagtcaaaaccaccaactgtctgaaaaaaataggcctttttgtaactagtattgtcactaaaccaactcctccatgttttgtgcatacatgaaatctaggcaatacacttgtattcccaaaagcttccacttgaagagatctgtgctctttccaaatataaaccttacccgagaggtggtcatcttggccacacctcagagagggagagaggcagtcttgttgggttgggtggtcataatggggctcagggccaaatccccagggggtaggatagtgcagagaagatggcactctccagtgcttaataaaatgcacgtggtctaagctgcccactccctcaaaggcaataaaaaataggtactatttaaattgaagagtaactactgccccagggaatggacaggttgtcattggaatagccatggttaatggtcccagttgacaactgaaatgaatgtgctacctgaacaggaaagcttattaaccagatttcaaagacagtctttcccggtaaatccaaatttacaaattaaagccagtaaagacaccgaattctctaataatatgtggggtgcagtatattttagagctgggaataattccaaacagcaaatagttcaaaatttattttcaatttagcatatgcatgcatttgcttaaactgtcttaaaaatgagtaaaaaatactgtcagtttgtttcaatcatactgagatgaggaacaatgtttagcattgcatgctagaaaaggacacaggattgggagtcagggctgggtgaccgtcacaggactttcactaactgtgtggatcttgggcaagtctgtgtgccctgagactcagttatttaactttcttttaaaaaacatagtccagatgcagataacaaagcctgcctctaatttcccttacagaattgtgagaagctggtggagatgtttgttacaaaagtgttttgaaaatagagcaaatattattctttttaaggcatgatgttttcatagcatgtcaggcaacaggaaaaaactaagttaggattttattttattgtggggaatttatgtgcaaattattgtgcaatttaatgaaaataagccaatgttttatacagaagtacccagaaaattaaataacactatacattgttcaaatagttgccttaatatattttattttctcagcataattagagttgtattatacaggtctttgagtagtcagtcagtgggagaagttaagacaacagatatctttttattaaaattattatatgaattatcgcaaattaatttttatggttctgtcacaggatgtctgactcaactctatgaaaacgccttcttcagaggtggggatgtagcttccatgtacaccccaaatgcccaatactgccagatgaggtgcacattccacccaaggtgtttgctattcagttttcttccagcaagttcaatcaatgacatggagaaaaggtaaaagttggtatttcattattggagaagctgtttttcaaaactgaatcagttttgtgcagaaaggtgtagtataactgagagttcttcctcacacggggttcaaggaccagcttcagcaaaatcccgtcaagtggttcttacaaatgcagattcctaggccacaacccagatctgctgaaccaaagtttcttgtgaccaggaatctgcattttaaacaatcactgtgtttctttaaagtagtagaagctagtcattttctattcaaagcctcaaaatgcttgaatatcattgggctaagggattgtctcaagaaagagtctaacaggtgcacatttcatctgaataaagaaacagatttaactgtgtgacccatgatcacattagcggatagcacagtccaaagaaaataacataagacaagcattttgctgagaatgtaattgagaaagatctagaacttgtgattttgggacagggcagttctaaatggggcctatagtgagccagtttgggcacctgtggcatgatgctatgtatggtgtgtgtgtgtatgtgtgcttgtgcttgtgtgaatatgtattattaactggaaatttgtaaaagtattggaaaaatagtacttacgattttgtgtgtgtgtgtgatggagtctcgctttgtagcccaggctggagtgcagtggcgtgatctcggctcactgcaacttccacctcccaggttcaagcgattctcctgcctcagcctcccaagtagctgggattacaggcacgcaccaccacgtccagctaatttttgtagttttagtagagacggggtttcaccacattggccaggctggccttgaactcctgacctcgtgatccacctgcctctacctcctaatgtgctgggattacaggcatgagccaccgcacccagcggtaattacaatttttattaggtcagagagatgcttattaatcacgagccacagtttcatcttaatgatttttccttttgattaatatccagagtaagcttttctttgttgttcccatttccatgttcataactctttactcatcttcactctatgtgagtttaccaactagaaattggatagtcattctctgatcccacatgttaaacttgtagagaaaactcagattgtatgtgaggatcatcatattaaaagtggaggaaggttctagaattcttataaataatgaaattaacatgaaggtggacatctaagacagagggaagtcttccattaagtgcagactacaaggagttaataagcaagatgaacacgatatacaaatccagctcttatcactaagttaactttttaagtaaatgaaagtatttgcaaaaataattaccaattgagaacatagttgcctgaaagtttaagaacacaggaaaaatcattaactctttaatatggttgatttcctgtacttaaaaaatgtgagtgtaaagaaaacgcagtgatggagttagatattatggggtgttataaaattagctctaagagtgttctttccagcaagtattggggaagctatattattttccttattcctggttttatttgttagtgtgtagaaaatgctagacatttcctcaatgtatgtttattattctacttcctaagtaaagctacttttaaaataggtttggttgcttcttgaaagatagtgttacaggaaccctgccaaaagtacatcgaacaggtgcagtttctggacattccttgaagcaatgtggtcatcaaataagtggtaagttgtgaatttcttagctacatttgagttaatattggatctcgcttagaacagcttttgctcaaagtttgtactgctacagctttttggaaggcatcactcataaagataggagatggggcagtattctggacacaaaagagggacccatattcatctggacacttctattgtctttataaatcaacacatacttaatgagcctctattatttatgaggttagcgctcaagtgtaagatttgcagaaaatgaatccaaataattgtgtctcgtttccagataagaatttttaagaaaacacaagggaacatctctctcaagttcacttgagggtaatttttacatcagtgattctcaaccagcagtgattttgtctcttccactggggacatttgacaatgtctggagacatttttggtggctacaactagggaggatgctattagcatttactaagtagaggccagaatgtttgaatgctgaccaacattctacaaggcacagggcagtcgtccacagcaaataattttctggcccaaaacgtcaacagtgctgacatcaagaaactctgtgatataccactaggcccaaattgaagaactgagttctgcaaatcttgctaagaataatacttcctaaaggaaacttgaggactaggatgctagagaactttgattctgacatctgaagctactgatgtcttgggaaacagtttccaatgctatcctaataaatttaagacaaatgaactatttctcaaacatgactgggactgataagaaagtgaaaagtgctgaaaagattcaactgatgggttgtcagaatcttaaaataactgctgttattctatgtatgactatatatcattactattttattttcattatgcacaattaattttgtaggttcaaatttcagatgtttttaaatttgtcatcctttcctccctcattgatatcacctcttcaatacgtacacactttgagcctgctgtttgcattttaaccagttatcaaaggatggcaatgccttcattataaatgtgggcctgacttagccagtataataggtgtagtctacgtgaggtggagtacatttcctattttaaaagatcaatttttatgttaatccaatttggtataaattattcgagtaagtgctatttctgattgttgtatcttgtagcaaaatttaaagaaaaagtaatttgtgcctttctcaatattcctgttattgttcatgtattctaaaactcactgttactcacttagcttgcttttaatgttttttaaagtgaaaaattgttcccaagtacataaaatctctacactcaagaacaattctagtcaaaagcatttagagcttccgtatgaacacttaaagagtttttatttgtaagagtcgcatcccaactcttagcctgttcttttctcacatgcagaaaaataggaaagagacttcgtttccacagtctgcaaattcctgtgtttaagaaccacagtgaataatccacctccctgcccaactcatcgtactgtcatatagttttcctgacagtttgtgtattttctgtctttcccacccttaaatttagttttatgacttcaaccatacttcttaggagtggaaaggtatctgtagtagattatggtttattccacataatcttggggaataaaactttaaaaaagtatacagtttatacttctggttacattacttccttaaccaaaagtctaaccaagaaatttgaatctttaaaaaaaaaagaggccgggcgcggtggctcacgcctgtaatcccagcactttgggaggccgagacgggcggatcacgaggtcaggagatcgagaccatcctggctgacacggtgaaaccccgtctctactaaaaatacaaaaattagccgggcgtggtggcgcgcgcctgtagtcccagctactcgggaggctgaggcaggagaatggcgtgaacccgggaggcggagcttgcagtgagtcgagatcgcgccactgcgctccagcctgggcgacagagcgagactccgtctcaaaaaaaaaaaaaaaaaaaagagcctaattttgcttcactgtctgtgaaaagaattatctgtatcttttgcatgtaagacaaatctcaatgaaaagggtgcttaaatagaagttaacactattttaaagcaagaatggaagtggtttcatcatgcgtaaacaacaactctccacattttgtaatgattgatctggatgcaatttgtcatcagacaggagaagtcgaaagcaaagaaataacactgggagatagagaagctctttcattcaatgcgaaaggtcaaaggcacatcagtttctttaataatgcaaacctcagcacacattatcagtgtcctcattattattgccttgtttatttcccactgctcattgataatttcaacgtgaaatttacctgtattgctgcatgcatcttgcagtttaagaagtgaagtaacccaatttcaaagctagtgctttagggaaaatattggattgtatttacttcaagcagagttcgataatttatgtacataataaaaattttaaatcccttagttaatatagcagttgccaaaactgggctattatcattctaaactaccaacccaaatggtagtgggtatctaatctacctctagaaagaaaatggactgtatttgctctatgtatttttcttgtacagcttgccatcgagacatttataaaggagttgatatgagaggagtcaattttaatgtgtctaaggttagcagtgttgaagaatgccaaaaaaggtgcaccagtaacattcgctgccagtttttttcatatgccacgcaaacatttcacaaggcagagtaccggtgagtacaattcaaggtgtgtgttctttgtattggtgcctccaggatttcactgtattcttcttaacctcttttgttcccaaactaaaaaccaaacagggcttttattctaaccactttcctcatttacttactctattttatttttttatcttttatttatttatttatttattgagatggagtcgcgctctgtcgcccaggctagagtgcagtggcgtaatctcgactcactacaacctccgcttcccgggttcaagcgattctcctgcctcagcctcccgagtagctgggattacaggcgtccgccaccatgcctggctaatttttgtatttttagtagagtcggggttttactatgttggtcaggctggtctcgaactcctgatcttgtgatccacccacctcagcctcccaaagcgctgggattacaggcatgagccactgcgcctcgcccttcattttttaattaaataattcatttaatttcatttgtttctctactcttttcccctggcatgtaattgtaccgcatcttcaaagcctgacatcctcttcccctacttctccaaagctgattcttgcaggtctttcctcaaataccgtcccctccaaaagcccatttctgagcattctcttttaagtcacactcagctctgtttatttcattcatagagctaatcacaatttgatattaacttgtgatttttttccttatttttaaatcttatttttatttgcatagatgtatggggtacaagtgtaattttgttactttgatgtattttacagtggtaaagtctgggcttttggtatatccatcactggagtcatgtacattgtacccactaagctatttttcaacgcccgcccccttcccacctctctgtcaccttcccagtctctactgtctatcgctccatgctctactcaattttggtgtcattttttcctgaagcaaaattttggtgtcattttttctgaagtcattttctgaagtctgtgtcatttttcgctttcctgaagcgaattttggtgtcatttttcctgaagttccgtttgccccacacataggccttgcttatagaatgagggtttagtgtcacggagtctcctgcctcattctcaccctaacttttcctttacccctttgcgaggggaaggatgtccattaggttaataatgcagacccctaacccactcattatcagggtcattgtttttccactgtgcattttaatactaactgttacctgcactgctccctgcccctcaaagtgcagaaagcaaagtaacctcttttcttcccattcaggaacaattgcctattaaagtacagtcccggaggaacacctaccgctataaaggtgctgagtaacgtggaatctggattctcactgaagccctgtgccctttcagaaattggtaattgtaggactacttcactttgtgattgtggtaggtggaataggagcccccagagacgtccctgtgctgagccctgggacctgtgcgtgtgttcccatagctggcaaaagcgtttctgtcaatggcatgcagttacgggcttcgagatggggagtttactctggattttctgaatgggcccaatgtactcacagggttgagtgctcacaaggctcataagaaaaagagagaggcggaaggctcagagccagagagagaggtttgaaggtattacactgctggctttgaagatgaaggtccgtgagccaaggaatgcaggcggcctctagaagttgaaaagggcgaggaaagagtttccctgtggagcgtcctggaggaagaagccctgctgatgtcttgattttagcccagtaagacccaatctctagaacagtaagataattaatttgtgttgtttttaaccactaagtttgtggttatgcccctagagcagcagttataggaaactagtacagtgatactgttagagttataggacagtgatataggacagtgatactgttatagttataggaaactagtacagtgatactgttagagttataggacagtgatataggacagtgatattgttatagttataggaaactagtacagtgatactgttagagttataggtacagtgatattgttatagttataggaaactagtacagtgatactgttacaggtacagtgatataggacagtgatactgttataggaaactagtacagtgatactgttagagttataggtacagtgacataggacagtgatactgttatagttataggaaactagtacagtgatactgttagagttataggtagagtgatataggacagtgatactgttatagttatagaaaactagtacagtgatactgttatagttataggacagtgatataggacagtgatattgttatagttataggaaactagtacagtgatactgttagagttataggtacagtgatataggacagtgatattgttatagttataggaaactagtacagtgatactgttagagttataggtacagtgatattgttatagttataggaaactagtacagtgatactgttataggtacagtgatataggacagtgatactgttataggaaactagtacagtgatactgttagagttataggtacagtgacataggacagtgatactgttatagttataggaaactagtacagtgatactgttagagttataggtacagtgatataggacagtgatactgttatagttataggaaactagtacagtgatactgttatagttataggacagtgatattgttatagttataggaaactagtacagtgatactgttagagttataggtacagtgatataggacagtgatattgttatagttataggaaactagtacagtgatactgttatagttataggacagtgatataggacagtgatattgttatagttataggaaactagtacggtgatactgttatagttataggtacagtgatattgttatagttataggaaactagtacagtgatactgttagagttataggtacagtgatataggacagtgatattgttatagttataggaaactagtacagtgatactgttatagttgtaggacagtgatattgttatagttataggaaactagtacagtgatactgttagagttataggtacagtgatataggacagtgatactgttatagttataggacagtgatattcttatagttaccgtggtatagttatagttaaaggtacagtgatattgttatagttataggacagtgatattgttatagttataggacagtgatgtagttacagtgatataggtacagtgatattgttatagttataggacagtgatatagttataggacagtgatattgttacagttataggtacagtgacgttgtaatagttataggacagtgatattgttatagttataggtacagtgatgttgtagcaaaactgtaaggtcattccttggttgtgtccctatctagtgaaatgactctaccaggggtagggaaataaaactctgtcgtttcacacataaaggtaatttcaatggaattatccagaaaattgccatgacattccacctcatttagcatgtcaggatgttaatgacaagatgttactaaaagcaaatcccttacggccagttttccgcagtactgggtgctggctctgtgcctggccctgtattgggtgctgggctaggatttccctgtggaagattgggaaggttggttacaaggtggctattttcctgtctcctctttgcgacagcacaccttctccatggtgtgtgccaggttcacgtgtactggtgatttaattttaacgttcatattatttttttctgggagagtttttgaaggctgccaggaggcaggactcgatgcaaacatgctccattctgtacccagccctgttgctggaaggatttgctgcacttacccagggaacaggcaagctcgtgctgtggctctgggctgtcacagctgctgtccacacctgggagagcaccctggatggctcatctgtgtacttgctttcttgttaaattgcagtgagttcacatgtgatttaatcggatcaaatggcctttacagactgataaaaatatggctgtttcaggtggtgttttgagctgctaagggcgtggcttttcactgagtacgtggtccccgttcctcagggaacacccagtagccacatgcctcctaaacctagagtagggctgtctcctggcctaactgcccaaatgagattcataagttagggatgatctgtagttatcactacagatttgtccttggtttcaccaaggattttcctaattttacaaacaaaacccctaaggctcctggaaggagggtagaagtgaaggtgctccgggggcaacacagctgatgagctgaaccagaactcgacccttgggtcacacacatttcacagtgctcactccaccttttgtttttttaatggatttaatggtgttttaaagcctcctgcctctcaacacatatgaattcattatatttacagatttccttctcttgtggtccatcttcctgcatagatcttgagagatgtcaggctaaccacgtttcctcagttaatttaacaaaaccatttgcaactctgacatggaaaattcctaccatgtgacttattaatttatcaattgagatggtacacatattttcaagccaaaaggaggaaaacataaattggaaaaaaaaggtttttttatttttatcacctctggggaagaaagtctgataaacgaagctggttgataaaattgcaattaggggaagcaacatcatggtttctgttcggaggctaaccagatggcatacttgaaatagagaatgtcctagaaatcaactggttgcttggccaaaatatctataaatagtgcccaacatattagataggaaaagcaaagtaaaaacaattttaacaggttaggacattgggctgaagtattgcatatatttaatgtcatgtgcgtccgtgtgaagagaccactaaacaggctttgtgtgagcaagaaagctttttaatcacctgggtgcaggcaggctgagtccgaaaagagagtcagtgaagggagatggggtggggacgttttataggatttgggtaggtagtggaaaattacagtcaaagggggttgttctctggcgggcagcggtggggggtcacaaggtgctcagtgggggagcttctgagccaggagaaggaatttcacaaggtaacgtcatcagttaaggcaggaaccggccattttcacttcttttgtctttcttcagttacttcaggtcatctagatgtatacgtgcaggcctgggcccagaggcctgacattcctgtcttcttatattaataagaaaaagaaaacgaaatagtggtaaagtgttggggtggcgaaagtttttgggggtggtatggagagataatgggcgatgtttctcagggctgcttcgagcgggattaggggcggcgtgggaacctacagtgggagagatgaagctgaaggaatattttatggtaaggggtgatattgtggggttgttagaagcagcatttgtcatatagaatgattggtgatggcctggatatggttttgtgtgaaatgagaaactaaatggaagacacaaggtctgaataagagaaggagaaaaacaggtgttaaaggactaagaattgggaggacccaggacatctaattagagagtgcctaagggggttcagtgtaattacttgcttggttggtgagtttttgggctctatccttgacagagtcctcctttttaagttggaggctgagcttggtgaggtgtgtttttaaaagaccattagtctgttctacctttcctgaagattgaggatggtgaggggtatgaaggttttactgaataccaagagcctgagaaactgcttgggtgatttgactaataaaggccggtctgttatcggattgtatagagatggaaaggccaaactgaggaattatgtctgacagaagggaagaaatgaccacggtggccttctcagaccctgtgggaaaggcctctacccatccagtgaaagtgtctacccagaccaagaggtattttagtttcctgactccgggtatgtgagtaaagtcaatctgccagtcctgggcgggggcaaatccccgagcttgatgtgtagggaagggagggggcctgagcaatccctgaggaggagtggagtagcagatggaacactgagcagttattttttgaggatagatttttacgacggaaaggaaaagtgaggttttaagaggtgggttagtggcttgtaacttacatggaagagtttatgaaatgatgacagaatagaatgggcctgtgaggctggaggagatattttccttggtccaagaattatttgccttgtgtgggaagagattgataggtggaagtttcaatgggggagtagatgggagtgacagatgaggaagaaaaaaactggctgtgagggatagaagttggaatgctcgctgcttttttagctaccttatcagcataggcattgtcctgagcagtgggatctgatgccttttggtggcccttgcagtgaatggcttcagcttcctttggaagtaaagtggccttgagaggagtttttattaaagaggcattaagatggagaacccttgtgtagtgaggaaacctccttcagcccatataaccgcatggtggtgcagaatatggaaggcatatttagagtcagtataaatattgacacgtagtccctttgcaagagtgagggcctgagttaaggcaatgagttcagcttgctgagaggtagtggagcggggcagagcagtagcctcagtgatagatgtggaagatactacagcatagcctgcctttgctggtgagtggtgattaggcctggtggaactgccatcaataaaccaagtgtgatcagggtaaggaacaggaaagaaggaaatatggggaaatggagtggatgtcaggtggatcagagagatacagtcatgggggtgggggccagcctaaaacagtaaggtcaagttgtttgaacagaaaggctacagggcgtggtcctggctcttgtgtaagaattttgactgcgcagccctgcacttcggctgtgtgtaatgaaaagggttgggatgagttagggagagctagtgtgggagcagtttctagggctgtttttaaggaatggcaagaggagtggctaaaggatttaggatctttggggtcagctagctttgcttttgtgagtttatataatggtttagtcaggatggtaaaacttagtatccaaaggcggaagtacttaaccatacctaggaagaaaaggagttgttttgtagaaggggttggggtttgggagatgagccagacacaatcagcagggagagcacatgtgttttcatgaagaattatgccgagataggtaatggatgaggaagaaatttgggcttgactgaagtaatgggggctgtcctcgaagccttgtggcagtacagcccaagtaagttgctgaggctgacgggtgtcagggtcagtccaagtgaaagcgaagagaggctgggatgaagggtgcaaaggaatagtaaagaaagcatgtttgagatccagaacagaataatgggttgtggagggaggtattgaggataggagagtatatggctttggtaccatggggtgaataggcaagacaatttggttaatgaggcacagatcctgaactaacctgtaaggcttgtccggtttttggacaggtaaaatgggggaattgtaaggagagtttataggcttcaaaaggccacgctgtaacaggtgagtgataacaggctttaatccttttaaagcatgctgtgggatgggatattggcattgagcggggtaagtgtgattaggttttaatgggatggtaaggggtgcacgataggttgccaaggagggagcagaggtgtcctatacttgtggattaaggtggggacacacaaggggaggatgtgaaggaggctttgaactggggaaagggtggcattgaggtgtggctgtggcctaagaacagtcagggaagcggataattgagttaaaatgcctcgacctagtaagggagctgggcaggtggtgataactaaaaaggagtgcataaaagaatgttgtccaagttggcaccagagttggggagttttaagaggtttagaagcctggcggtcaatacctacaacagttatggaggcaagggaaacaggcccttgaaaagaacgtaatgtggagtgggtagcctctgtattaattaagaaggggatggatttaccctccactgtaagagttacctaaagcatctgtgatggtccaggaggcttctaaggtgatcgggcagcgtcagtcttcagccgctaagccaagaagatctgggaagcagtcagtcagagagccttgggccagagttccaggggctctgggagtggcagccaggccagttagacagtccgatttctagtggggtcccacacagatgagacacagcttaggaggaatcccaggctgcgggcattccttggcccattggccagatttctggcacttgaaacaagatcctgatggaggaggtcctgtaggaatgcttgaccactgcagtttaggcattttgaagtttttgtgtgtgctggagatgtggctgggttttgtctcacagcagaggcaaggaatcgcaactcagaaatacattgctacttggctgcctctattattgtacatcttgaaggcgaggttaattaagtcctcttgtggggtttgagggctggaatctaatttttggagtttttttttgtttgttttttggttttttttttttaatgtcaggagctgactgggtgataaaatgcatattgagaataagaggccttctgacccttctgggtctagggctgtaaagcgtctcagggttgctgccaaacgggccatgaactgggctgggtttttcatatttgatgaaaaagagcctaaacgctaactgatttgggagaggtcggataaataaaaaggaacattaatcttgactatgcctttagctccaaccacctctttaagaggaaattgttgggcaggtgggggagggctagtcgtggaatgaaactgtaagctggaccgggtgtgaggaggggaggtgatagaaggattatagggtggaggagcagaggctgaggaagaattgggatctggcttggcctggcaaggagcagcctggggaggaggggagaggtcagatgggtccatagaaaaggaggattggaaagactcagcaacacttggggttgggattgagaggacagatgggttgggattgaggggacagatgggagggaaagaaggaagatttgggacaagttgcattgggaacagagactagggagggaccaatgtgtaaaagaatgcctggacgtcaggcacctcagaccgtttgcccattttatgacaagaattatctagatcttgtaggatggaaaaatcgaaagtgccgttttctggctatttggaaccattgtcgagtttgtattggggttaagcagcattgcagaagaaaataaggcatttaggttttaggtcaggtgtgagttgaagaggttttaagttcttgagaacataggctaagggagaagaaggaggaatggagggtggaaagttgcctatagtgaaggaggcaagcccagagaaaagagagggtagagacatggagagaaggggtgggggggtgcttgcccccaggaaagtggttcttgccactaagggtgaaggatcaaggcaggcattcgcgcggtgatcagatacctctgaaacgtgggtgaataatcaagcaggtgtccctgcagtgattaaacagcaaggaaagactatcttcccaagtccatgaccagtgccagagttttgggttcatggataaaacgcgtctcctctgtctctaccagaaaatgaaaggaattgaaattaagagaagggagagattgaaggatggcgccaagattgaaaggaaaaagaggttgagggatagggagagaggttggataagagagtaaaaagaggctgcttacccaatttaaaatcggtgagatgttccttgggcttgttggtctgaggaccagaggtcatgggtggatctttctcatggagcaaagagcagggggacaggggattgatttcccaagggaggtcccctgatctgagtcacagcaccaaatatcacgtgtgtccatgcgaagagaccaccaaacaggctttgtgtgagcaagaaagctttttaatcacctgggtgcaggcgggctgagtccaaaaagagagtcagtgaagggagataggggtggggacgttttataggatttgggtaggtagtggaaaattacagtcaaagggggttgttctctggcgggcaggggtggggggtcacaaggtgctcagtgggggagcttctgagccaggagaaggaatttcacaaggtaacgtcatcagttaaggcaggaaccggccattttcacttcttttgtcattcttcagttacttcaggccatctggatgtatgcatgtaggcttgggcccagaggcctgacatttaacatggataaatgtaaagttcttagaatcatacatacactttggaaaagatggggcttaatcgcactttataagacttgaaggatgtttgagaatcactatgaaactgctgaaaataccaagaaaatttaattcttatgtatataaataatgtgtctgttttacatgaatcccttctacaagcttggtatttaatatggcatatattgttttttcatagtagatttaaaatttttgatatctaatttagataacataaaattaaccctttgaaagtgtacaactccgtggtttttagtatatccacctgattgcacaacgatcaccactgtctagttccagaacatttttatcaccacaaaagaaaggctgtatccaggccgggcacggtggctcacgcctgtaatcccagcactttgggaggccgaggcgggcggatcacggggtcaggagattgaaaccatcctgggtaacacggtgaagccctatctgtactaaagatacaaaaaaattagctgggcatgatggcagatgcctgtagtcccagctactcaggaggctgaggcaggagaatggcctgaacccaggaagcggagcttgcagtgagccaagattgcgccactgcactccagcctgggcgacagagcaagactccatctcacaaaaaaataataaaaataaaataaaaaaaaaaaagaaaggctgtctttctcctttcccattggccgtctttctccattccctactcctccaatcccctggcaaccactaaatctactttccatgtctgtggacttgactcttcgggacattttacataaatggaatcatgcaatgcagcacattttgcatctggcttttttcacctggcgtgttttcaaggctcattcgtattctagcatatatcaatactttgttcctatttaggactaaataagattctattgtatgaataaaacatattttgtttatatacttagtttgatgaacatttgagttgtttctggatttttttttttttttttttgcctcttatgaataatgctgctatggacaacagtttttgggtaggcatgcattttaaattctcttatgtatatacttaggattaaaattgctggatcacagagtaactccatgtttaactttttgatgaattgccaaactgtttttgagagcagctacacaatgttacattcttaccagcaacaattgagggcttcagtctctctacaaccttaacaacacttgttattgtctttgtaattattgcctttctaggcagtgtgaagtggtgtctcactgtggttttgatatgcatttccctaatgactaacaatgttgtgtatcttttcgtgtgctcattttcaatttgaatacattctttgggaaaatctctgtttaaatcttttggccattaaaaataattgggttattttcattgttgagttgtatgaactctttatatactctggatactacactcttatgacatatattattttcaaaaattttctgtgcatctgcaggtcatcttttcactttactgatggtgttctttgaagcaccaaagtttttaaacttgatgaaatccagtctggctttattcttgcacgtgctttacctaaaacgccaaaacctaattcatggttttgaagatttttgcttatgatttgttcttagaggtttatagttttagctcttacatttaggcatttgatgcattttaaattaaattttgtatatggtgtaaagtagcaatccaacttaattcttgcatgtgggtattcagttattccattgtcttgaaacccttttcaaaatcaattgtctataaatgtaagagtttatttttggaccatcagttctatcctgttgacctatatatgcctatcctaatgccagttacacacagtcttgattaccataactttgcagtaagttttgaactcagacagtctgagtgcttttattttgtcctttttcaagattaatttggttattccggatcttttgcatttccatatgaattttaggatggttgtcaatttctgcaatagaaaagcagcaggattttgatagagagtgcattgaatctgtagaccaatgagtatcaatggaattatgtgttatcaaatttagtaaactacataaacgatatgtacacaactaaaacaaaactaagatataagatcatattaatgtaatgataataaaagtggattgtctcctgttctaattttaataggcacaaggcatttttgttaatcacttcttattaaagaattttttataatattcaggaaaatacaacaaaaaaacccttacattcctaaggcctcagagtcagagtaatataaaggaaatgtaaacacatgctgagtaatgcaagcatttggcaatggtggtgactggagctgggagcacagcttttatttctctgaaataggaatttgccccttagagttagaccaattttgccttcctctaaatggcaaacagtttggagatactttaaaggacattttttcacttaggatgtttagtactatgaataataaatagtcacaatttccttaactatggtgacaaaatacaagcaaatttagcctcatgtcatttcctaaggaacatcttctctctgtgagttcacaggttgccacatgaacatcttccagcatcttgcgttctcagatgtggatgttgccagggttctcactccagatgcttttgtgtgtcggaccatctgcacctatcaccccaactgcctcttctttacattctatacaaatgtatggaaaatcgagtcacaaaggcgagtatgcatggaaaatcgcatcacaaaggcgagtatgcatggggagcacttgctgctgtactttcatcacttttatagtctgagttcttaaaagtttcgttcatttccctcaaaacacttgaacctgcagtttcagtaggtactgttctgccaggtgcagattagttaagagattagcagacttctctgcctatcttctcttactttaaaacaaatgttaccattgaatcaaggaagcaatagccatgagaaaaaagaaggatctgacgcctttgaatgaagattcaaaacatgatcttcatgttttgtattagcttggagtaaaatccacttgctggcaatatagcccttaagcttgttgcctcttctctttgtttcagaaactagagccctgtttattctgatcaaggctctggcccactgtctttatctcagataacccaccctcttctgcacacagcatggagctaagagaagggtgtctagttatgtaatatcatcggcagcataaattcccagaatttgttctttgatttttttgtttgtttttccagttagaaggtggaacttcatcattgtcctcttttcaggttgtctgtgcctattagttttctccagagggagaggtggcttgatttacatttaatctctgcaatttattagagtcctgtagttggatttactttgaagagagtttcccagaagaataaaatttgctgcgttgctttttgggtgtgagctgcttttgtatttgcctaatgcctttaatgcaaatttctttctttctctcttgcttttttttaaaaaaaatagaaatgtttgtcttcttaaaacatctgaaagtggcacaccaagttcctctactcctcaagaaaacaccatatctggatatagccttttaacctgcaaaagaactttacctggtaatgtgatttgataataatattacataaaatgtaacctatttcatgacttttaacagcaacagtgatgaaacaatcctcaaggtaacagaaacttgtgtaaatgtcgttcattgcttttcccatctgatatctttttgtgtttataattgacacagaaccctgccattctaaaatttacccgggagttgactttggaggagaagaattgaatgtgacttttgttaaaggagtgaatgtttgccaagagacttgcacaaagatgattcgctgtcagtttttcacttattctttactcccagaagactgtaaggaagagaagtaaaggaaattttatttttcaaagacagttgacatgaccatttcatattctctttccccctgtgaaggcttactctttctactgttcatttcatctaggtgtaagtgtttcttaagattatctatggatggttctccaactaggattgcgtatgggacacaagggagctctggttactctttgagattgtgtaacactggggacaactctggtgagtaacctcactttttcgtggacctgtcagggatgtctgtcatgttgatagtttgcttagtcttaaggaattatgtgtcttgttctccttggttagaagggactttgattcacttctaattccaaccattagcgtcaacgctctcttttcagtctgcacaacaaaaacaagcacacgcattgttggaggaacaaactcttcttggggagagtggccctggcaggtgagcctgcaggtgaagctgacagctcagaggcacctgtgtggagggtcactcataggacaccagtgggtcctcactgctgcccactgctttgatgggtaagtgttggatgcatctcatccagagtcttatcttggcttttcattttgaaggatctatgatcagctgcttcaccgccatgtgactttatgaatagagacgtgttaaagcggggatggtattcacaacatttaacttatagggtccaagcactgaccaacctgaccattagaacagagtgtggtctctgtacagggcagatggcgctgagtgggtattctccacagaaagagaaacgaagacagtaccccactcctccaacccaccacccaccaccaatcccaccaccaattccaccaccaatcctgccacccaccaccaatctcaccaccaatcccaccaccaatcctaccacccaccatcaatctcagcaccaatcccaccaccaatcccaccaccaatcccaccacctaccccaccaccaatcccgccacccacgaccaatcccaccaccgatcccgccaccaatcccaccaccaatcccaccacctaccccaccaccaatcccgccacccacgaccaatcccaccaccgatcccgccaccaaccaccaatcccaccaccaatcccaccaccaatccctgatgtgttcttcaaagacttatttgtcaggcccatagaaatgttacttcttgctctttgattcataaatatactaagtcataataatttttaaaagtgagagtttcgtactctgtatatttcaatgtatataatttgatctatttcaatttattggtcaaatagtagacatgttaggtaagtcttaaaatactgaggctttggagttagacagaacatggcttaagtgacagctttgctgcttattagaggtgtggccctagaagatttgtaaatccctctgagctttatttgatctaaaatatgaatagtaatagtcccgaatttgtaacgttgttgggaagattaagtgacacatttaaaatgcttagtactgtgtgtagaacataaacacttcaaaaaatgtaaactgtgatttctatattcaataagaaatgtagaaatggacaaagcatataaaaagcaaaagaaatactagaagacacttgatttttctcaaaaataaacacaccaagtatttttgttttagtgaaattcatgcttacatgctgtatactaggattgaacatactgccaccaaaatatagcagtcggtggtacatgtgggtggagcaagacccctccaccttgtcatcgtgtgaaggggctctgccatacatgaccttgcatgtgactttaaggtggttggcctggaagaaaagtcccaagatgggaaatagtaggtgtcttttttactaaatgcactccaatttgggaccaaaaattttcattcttgaaggctcagtattgtgagtttataagagataatagacataaaagtgtaatgatttcattgcaaataaaaaaaggcccctttgcacctgatatctccatcatttttctagaattttgtgcacacatgccttgcactacttggtgatgataaagatttccagatctttgcacagaataaggctttgctttagatcagaattttggatgtacttagtatacattcatcttttaaataatctatttacattttcatactttccaaaatacagatatattttattttatttatatatttatttaatttattttttgagatggagtctctctctgttgcccagagtagagtgcagtggcacaatcttggttcactgcagcctctgcctcccgggttcaagcgattctcctgcctcagcctcctgagtagctgggattacaggcgcgcgccacacctggctaatttttgtatttttagtagagacgaggtttcatcatgttggtcaggctggtctcgaactcctggcctcaagggatccacccacctcggcctcccgaagtgctgggattacaggtgtgggccactgtgcccagctgtatagagatattttaaacaacactaaagtcctcctactttgactaattagaagagcattagaagatcagcctgacttcttgacagttctgaatttagtggagcaatgaggttcagctttggtgaatgagcttaatttttccatgataaactgctagtttcttcccactacagtgtctctcaaaaatgggacagcaacattctttttgttttcacttgcagtaagcatgatgcaattacataaatgtacacttttcaatttgttaaatagaatcttcagagattcactactgccgctattggtgatgaaaaattaccagaaggaggaattaggtaggagaaaatgtgtcctatgtatttccttcccagttctttgaaagagagtgataggaaaaaggaacactattgaaggaaggactgcccagtttcaaacaggtatttatttttctctcctaggcttcccctgcaggatgtttggcgcatctatagtggcattttaaatctgtcagacattacaaaagatacacctttctcacaaataaaagagattattattcaccaaaactataaagtctcagaagggaatcatgatatcgccttgataaaactccaggctcctttgaattacactggtatgtagcatatgtaagaaggtggagagcagaattgcgctggttgatattttcatatcagtttgaacaagagggcagacctagagagactgtcgtcgttttctgactggtggagttgagggaaacgtgagggttgctgggaagtgaagaccccgcgacttgccgtgaaatctcttctacttaaagagcaagacatgtgaattaattctttcagggagggatacaactgcatgcaggtgatggaaataatgggcgtgggaaatgtctgtgccgtctgagaggcactgggcttgctttgacaagagtagcagaactgtcattgctttgggcttagggatattcgaatgtgtgagggcaagtgggatcagatatctacttccaggtataatttgggtaggaaagagactcatgcagaaagaagccctggaaggccagagcatcgtggtcagaggtgttgcctttggagggtcattgctgccaggagccgaatacccactgtatccaataacattcatggtcaggaatggtggctcacacctgtaatcccaacactttgggatgcccaggtgggaggattgcttgaggccaggagtttgagaccagcctgggcaacacagtgagaccccgtctctacataaaattagaaaaaaacaattaactgggtgtggtggtgtgcacctgtagtcccagctagtcaagaggctgagacaagaggatctcttgagcccaggagctcaaggctgtagtgagccaagatcgtgccactgcacacaaacaattatgtgacctcgggcaagttgctttacctctttacacctcttaatttccttatctgtaaaatgaggatgataatttcttcctgggtctgttgtaataattaatacatcaaagcacttcatgtctggaacagtgaagataccctgctatgactattaaggatagtatacatggaataagacacaggaacttctaaatgcttttgaccatagatttaggttctgagttttaagaatttaactcaggaaattgtaacaccaaaaatgtcatgtgaaaaatggtggtgacaaattttcttgaatcattagccttagaggttgggcagaaagcaaaaaattattcttgatgctactctatagaaagagaagacagaaaaagagaaagatgtatttttaaagtctatatccataactttatttgaccaaactctaatttaaaaattatgtttcagaattccaaaaaccaatatgcctaccttccaaaggtgacacaagcacaatttataccaactgttgggtaaccggatggggcttctcgaaggagaaaggtaagcatgacgctttaaatattgcttctagagtaagtctcacatgttgaaatacatggagtgggtcgttttaatcggtttctgtctgaaattatatctaaactctttatctttcctatctatttattcccaaatatttattcagttattcttaaaaaatgtatttttgctttggcttgaaaaaaaattttagggagacttttaagcatcttacttcattataaagatcagttgcttgactttgcatgaagcagattgggcccttctagggctgacaagcccgtgcaagaccacccgctcctcagtgttagtagcgttcccgtctcccaaaaccatgttctcccttgatgctaatggccgggagcacaggcaggtgtgtcgtctcactatggagaataatatttgtgtcattctttacagaagaaggtagcttgccaaactgtctccatctttcccgattcagtcttttgttcaagtaattcacatttttagattttttattggtaatctgagacaagaagaaatttaaagtaatcttcactaagccatgaaagctcccaacattgttctccatgagagatgctggcctgcatttattcaaaaacaaaagacccctctgttgccaaagctcggagggcttttcagaaacgatatagttgtaaattataattttgaatatataaagcaaaaaaatgaaaagtgagaacttccaggctttggattgttgtaggtgataaatataaaatgggatttctggggggctgctactgagatgaggggatggcagaaaacatggaagcaaggtctctggtcagcccagggtgctgggcttgtcccaacaccacgtaggcaataagaggacagtacagggtgccgtctctctccctcttcctctctctgtctctctctctctgtgtgtgtgtgtgtgtgtgtgtgtaacactaccttcccaatttttactgtctatttgtattcaaagataaggtccttatgaaaaatacactgctctgattcactttaaaacttatttccatatttattatttattgtgggaataataatattcccaatattattatttattatttaagttattattattaacttccctctgaggttatatattggttactcacaggtgaaatccaaaatattctacaaaaggtaaatattcctttggtaacaaatgaagaatgccagaaaagatatcaagattataaaataacccaacggatggtctgtgctggctataaagaagggggaaaagatgcttgtaaggtaactcatgagattatgaaaaacacaataggctgcttgagaaaattcatttcaaaatatattttccaatagcataattcaatcatagtttttaaaaaaattcagagacaaatgatctgataaattgataagcaacttttaacaaattgaatatacataatatatatttatattatttatgatatatgtcacaatctatgcatgtgctatttaagaggggcaaatatacatgcaataattgtgctagaatataaaaacattagacttcatcattgggatgatgatatcaagatttctttgttagatttatttcagatagaaaaggggatacgaaaaatgcaggcacatgagatacttggagaactttaagaaagagtgagtgtgtgtgtgtgtgtgtgtgtgtgtgtgtgtgtgtctggcaagcaaggtcttgcacacacacagcactttgggaggccaatgcaggtggatcacttgagcctaggaatttgagaccagtctgggcaatgtgatgaaacccatctctacaaaaaaatatgaaagtatctgtgtgtgtgtgttgctgtgtagtggactacagaactttagaggcagtcacttatttgaatcccattgtcgtaactttctactattttatttttccactgtgactcagggagattcaggtggtcccttagtttgcaaacacaatggaatgtggcgtttggtgggcatcaccagctggggtgaaggctgtgcccgcagggagcaacctggtgtctacaccaaagtcgctgagtacatggactggattttagagaaaacacagagcagtgatggaaaagctcagatgcagtcaccagcatgagaagcagtccagagtctaggcaatttttacaacctgagttcaagtcaaattctgagcctggggggtcctcatctgcaaagcatggagagtggcatcttctttgcatcctaaggacgaaaaacacagtgcactcagagctgctgaggacaatgtctggctgaagcccgctttcagcacgccgtaaccaggggctgacaatgcgaggtcgcaactgagatctccatgactgtgtgttgtgaaataaaatggtgaaagatca

SEQ ID NO: 380 - DNA, 23 bp, synthetic construct
  source 1..23: mol_type = other DNA
cttacctttctccttcgagaagc

SEQ ID NO: 381 - DNA, 23 bp, synthetic construct
  source 1..23: mol_type = other DNA
ataccagtgtaattcaaaggagc

SEQ ID NO: 382 - DNA, 23 bp, synthetic construct
  source 1..23: mol_type = other DNA
acttacccatcaaagcagtgggc

SEQ ID NO: 383 - DNA, 23 bp, synthetic construct
  source 1..23: mol_type = other DNA
attaccaggtaaagttcttttgc

SEQ ID NO: 384 - DNA, 23 bp, synthetic construct
  source 1..23: mol_type = other DNA
caattaccaatttctgaaagggc

SEQ ID NO: 385 - DNA, 23 bp, synthetic construct
  source 1..23: mol_type = other DNA
cacttaccacaggaaactgtagc

SEQ ID NO: 386 - DNA, 23 bp, synthetic construct
  source 1..23: mol_type = other DNA
catttcacaaggcagagtaccgg

SEQ ID NO: 387 - DNA, 23 bp, synthetic construct
  source 1..23: mol_type = other DNA
actgtaaggaagagaagtaaagg

SEQ ID NO: 388 - DNA, 23 bp, synthetic construct
  source 1..23: mol_type = other DNA
ctctcctaggcttcccctgcagg

SEQ ID NO: 389 - DNA, 23 bp, synthetic construct
  source 1..23: mol_type = other DNA
gtgactcagggagattcaggtgg

SEQ ID NO: 390 - DNA, 23 bp, synthetic construct
  source 1..23: mol_type = other DNA
tgaatctccctgagtcacagtgg

SEQ ID NO: 391 - DNA, 23 bp, synthetic construct
  source 1..23: mol_type = other DNA
tacataccagtgtaattcaaagg

SEQ ID NO: 392 - DNA, 23 bp, synthetic construct
  source 1..23: mol_type = other DNA
acacttacccatcaaagcagtgg

SEQ ID NO: 393 - DNA, 23 bp, synthetic construct
  source 1..23: mol_type = other DNA
cacttacccatcaaagcagtggg

SEQ ID NO: 394 - DNA, 23 bp, synthetic construct
  source 1..23: mol_type = other DNA
tacaattaccaatttctgaaagg

SEQ ID NO: 395 - DNA, 23 bp, synthetic construct
  source 1..23: mol_type = other DNA
acaattaccaatttctgaaaggg

SEQ ID NO: 396 - DNA, 23 bp, synthetic construct
  source 1..23: mol_type = other DNA
aaataggtttggttgcttcttga

SEQ ID NO: 397 - DNA, 23 bp, synthetic construct
  source 1..23: mol_type = other DNA
tcttgtacagcttgccatcgaga

SEQ ID NO: 398 - DNA, 23 bp, synthetic construct
  source 1..23: mol_type = other DNA
ttcacaaggcagagtaccggtga

SEQ ID NO: 399 - DNA, 23 bp, synthetic construct
  source 1..23: mol_type = other DNA
ctgtaaggaagagaagtaaagga

SEQ ID NO: 400 - DNA, 23 bp, synthetic construct
  source 1..23: mol_type = other DNA
ctaggtgtaagtgtttcttaaga

SEQ ID NO: 401 - DNA, 23 bp, synthetic construct
  source 1..23: mol_type = other DNA
tctcctaggcttcccctgcagga

SEQ ID NO: 402 - DNA, 23 bp, synthetic construct
  source 1..23: mol_type = other DNA
tcatgcttacctttctccttcga

SEQ ID NO: 403 - DNA, 23 bp, synthetic construct
  source 1..23: mol_type = other DNA
atgcttacctttctccttcgaga

SEQ ID NO: 404 - DNA, 23 bp, synthetic construct
  source 1..23: mol_type = other DNA
acataccagtgtaattcaaagga

SEQ ID NO: 405 - DNA, 23 bp, synthetic construct
  source 1..23: mol_type = other DNA
acacttacacctagatgaaatga

SEQ ID NO: 406 - DNA, 23 bp, synthetic construct
  source 1..23: mol_type = other DNA
ttacagtcttctgggagtaaaga

SEQ ID NO: 407 - DNA, 23 bp, synthetic construct
  source 1..23: mol_type = other DNA
ctcaccggtactctgccttgtga

SEQ ID NO: 408 - DNA, 23 bp, synthetic construct
  source 1..23: mol_type = other DNA
acaacttaccacttatttgatga

SEQ ID NO: 409 - DNA, 23 bp, synthetic construct
  source 1..23: mol_type = other DNA
ttaccttttctccatgtcattga

SEQ ID NO: 410 - DNA, 27 bp, synthetic construct
  source 1..27: mol_type = other DNA
atttcacaaggcagagtaccggtgagt

SEQ ID NO: 411 - DNA, 27 bp, synthetic construct
  source 1..27: mol_type = other DNA
tcactgctgcccactgctttgatgggt

SEQ ID NO: 412 - DNA, 27 bp, synthetic construct
  source 1..27: mol_type = other DNA
ttctctcctaggcttcccctgcaggat

SEQ ID NO: 413 - DNA, 27 bp, synthetic construct
  source 1..27: mol_type = other DNA
ttctcttccttacagtcttctgggagt

SEQ ID NO: 414 - DNA, 27 bp, synthetic construct
  source 1..27: mol_type = other DNA
ccttacagtcttctgggagtaaagaat

SEQ ID NO: 415 - DNA, 27 bp, synthetic construct
  source 1..27: mol_type = other DNA
tcatcaaataagtggtaagttgtgaat

SEQ ID NO: 416 - DNA, 27 bp, synthetic construct
  source 1..27: mol_type = other DNA
ttgccatcgagacatttataaaggagt

SEQ ID NO: 417 - DNA, 27 bp, synthetic construct
  source 1..27: mol_type = other DNA
ccacgcaaacatttcacaaggcagagt

SEQ ID NO: 418 - DNA, 27 bp, synthetic construct
  source 1..27: mol_type = other DNA
atttcacaaggcagagtaccggtgagt

SEQ ID NO: 419 - DNA, 27 bp, synthetic construct
  source 1..27: mol_type = other DNA
ctcctcaagaaaacaccatatctggat

SEQ ID NO: 420 - DNA, 27 bp, synthetic construct
  source 1..27: mol_type = other DNA
cagctcagaggcacctgtgtggagggt

SEQ ID NO: 421 - DNA, 27 bp, synthetic construct
  source 1..27: mol_type = other DNA
tcactgctgcccactgctttgatgggt

SEQ ID NO: 422 - DNA, 27 bp, synthetic construct
  source 1..27: mol_type = other DNA
gtgaggacccactggtgtcctatgagt

SEQ ID NO: 423 - DNA, 27 bp, synthetic construct
  source 1..27: mol_type = other DNA
gccagggccactctccccaagaagagt

SEQ ID NO: 424 - DNA, 27 bp, synthetic construct
  source 1..27: mol_type = other DNA
ccttacagtcttctgggagtaaagaat

SEQ ID NO: 425 - DNA, 27 bp, synthetic construct
  source 1..27: mol_type = other DNA
cttctcctccaaagtcaactcccgggt

SEQ ID NO: 426 - DNA, 27 bp, synthetic construct
  source 1..27: mol_type = other DNA
tcgattttccatacatttgtatagaat

SEQ ID NO: 427 - DNA, 27 bp, synthetic construct
  source 1..27: mol_type = other DNA
caaatgcccaatactgccagatgaggt

SEQ ID NO: 428 - DNA, 27 bp, synthetic construct
  source 1..27: mol_type = other DNA
ttccttgaagcaatgtggtcatcaaat

SEQ ID NO: 429 - DNA, 27 bp, synthetic construct
  source 1..27: mol_type = other DNA
ttgaagcaatgtggtcatcaaataagt

SEQ ID NO: 430 - DNA, 27 bp, synthetic construct
  source 1..27: mol_type = other DNA
aagcaatgtggtcatcaaataagtggt

SEQ ID NO: 431 - DNA, 27 bp, synthetic construct
  source 1..27: mol_type = other DNA
aatgtggtcatcaaataagtggtaagt

SEQ ID NO: 432 - DNA, 27 bp, synthetic construct
  source 1..27: mol_type = other DNA
tcatcaaataagtggtaagttgtgaat

SEQ ID NO: 433 - DNA, 27 bp, synthetic construct
  source 1..27: mol_type = other DNA
ttgccatcgagacatttataaaggagt

SEQ ID NO: 434 - DNA, 27 bp, synthetic construct
  source 1..27: mol_type = other DNA
catcgagacatttataaaggagttgat

SEQ ID NO: 435 - DNA, 27 bp, synthetic construct
  source 1..27: mol_type = other DNA
gaagaatgccaaaaaaggtgcaccagt

SEQ ID NO: 436 - DNA, 27 bp, synthetic construct
  source 1..27: mol_type = other DNA
ccacgcaaacatttcacaaggcagagt

SEQ ID NO: 437 - DNA, 27 bp, synthetic construct
  source 1..27: mol_type = other DNA
atttcacaaggcagagtaccggtgagt

SEQ ID NO: 438 - DNA, 27 bp, synthetic construct
  source 1..27: mol_type = other DNA
acaaggcagagtaccggtgagtacaat

SEQ ID NO: 439 - DNA, 27 bp, synthetic construct
  source 1..27: mol_type = other DNA
atcttccagcatcttgcgttctcagat

SEQ ID NO: 440 - DNA, 27 bp, synthetic construct
  source 1..27: mol_type = other DNA
tcacaaaggcgagtatgcatggaaaat

SEQ ID NO: 441 - DNA, 27 bp, synthetic construct
  source 1..27: mol_type = other DNA
ctcctcaagaaaacaccatatctggat

SEQ ID NO: 442 - DNA, 27 bp, synthetic construct
  source 1..27: mol_type = other DNA
tgtttgccaagagacttgcacaaagat

SEQ ID NO: 443 - DNA, 27 bp, synthetic construct
  source 1..27: mol_type = other DNA
ttgccaagagacttgcacaaagatgat

SEQ ID NO: 444 - DNA, 27 bp, synthetic construct
  source 1..27: mol_type = other DNA
tcccagaagactgtaaggaagagaagt

SEQ ID NO: 445 - DNA, 27 bp, synthetic construct
  source 1..27: mol_type = other DNA
gtggccctggcaggtgagcctgcaggt

SEQ ID NO: 446 - DNA, 27 bp, synthetic construct
  source 1..27: mol_type = other DNA
cagctcagaggcacctgtgtggagggt

SEQ ID NO: 447 - DNA, 27 bp, synthetic construct
  source 1..27: mol_type = other DNA
tcactgctgcccactgctttgatgggt

SEQ ID NO: 448 - DNA, 27 bp, synthetic construct
  source 1..27: mol_type = other DNA
tgctgcccactgctttgatgggtaagt

SEQ ID NO: 449 - DNA, 27 bp, synthetic construct
  source 1..27: mol_type = other DNA
ctgcaggatgtttggcgcatctatagt

SEQ ID NO: 450 - DNA, 27 bp, synthetic construct
  source 1..27: mol_type = other DNA
ctccaggctcctttgaattacactggt

SEQ ID NO: 451 - DNA, 27 bp, synthetic construct
  source 1..27: mol_type = other DNA
tgaaatccaaaatattctacaaaaggt

SEQ ID NO: 452 - DNA, 27 bp, synthetic construct
  source 1..27: mol_type = other DNA
atccaaaatattctacaaaaggtaaat

SEQ ID NO: 453 - DNA, 27 bp, synthetic construct
  source 1..27: mol_type = other DNA
tctacaaaaggtaaatattcctttggt

SEQ ID NO: 454 - DNA, 27 bp, synthetic construct
  source 1..27: mol_type = other DNA
gaagaatgccagaaaagatatcaagat

SEQ ID NO: 455 - DNA, 27 bp, synthetic construct
  source 1..27: mol_type = other DNA
tcagggagattcaggtggtcccttagt

SEQ ID NO: 456 - DNA, 27 bp, synthetic construct
  source 1..27: mol_type = other DNA
ggagcaacctggtgtctacaccaaagt

SEQ ID NO: 457 - DNA, 27 bp, synthetic construct
  source 1..27: mol_type = other DNA
gatgcagtcaccagcatgagaagcagt

SEQ ID NO: 458 - DNA, 27 bp, synthetic construct
  source 1..27: mol_type = other DNA
aatctccctgagtcacagtggaaaaat

SEQ ID NO: 459 - DNA, 27 bp, synthetic construct
  source 1..27: mol_type = other DNA
ccctgagtcacagtggaaaaataaaat

SEQ ID NO: 460 - DNA, 27 bp, synthetic construct
  source 1..27: mol_type = other DNA
agaagccccatccggttacccaacagt

SEQ ID NO: 461 - DNA, 27 bp, synthetic construct
  source 1..27: mol_type = other DNA
gccccatccggttacccaacagttggt

SEQ ID NO: 462 - DNA, 27 bp, synthetic construct
  source 1..27: mol_type = other DNA
tccggttacccaacagttggtataaat

SEQ ID NO: 463 - DNA, 27 bp, synthetic construct
  source 1..27: mol_type = other DNA
tggaattctgaaacataatttttaaat

SEQ ID NO: 464 - DNA, 27 bp, synthetic construct
  source 1..27: mol_type = other DNA
ggggaagcctaggagagaaaaataaat

SEQ ID NO: 465 - DNA, 27 bp, synthetic construct
  source 1..27: mol_type = other DNA
ttacccatcaaagcagtgggcagcagt

SEQ ID NO: 466 - DNA, 27 bp, synthetic construct
  source 1..27: mol_type = other DNA
gtgaggacccactggtgtcctatgagt

SEQ ID NO: 467 - DNA, 27 bp, synthetic construct
  source 1..27: mol_type = other DNA
gccagggccactctccccaagaagagt

SEQ ID NO: 468 - DNA, 27 bp, synthetic construct
  source 1..27: mol_type = other DNA
gactgaaaagagagcgttgacgctaat

SEQ ID NO: 469 - DNA, 27 bp, synthetic construct
  source 1..27: mol_type = other DNA
aggttactcaccagagttgtccccagt

SEQ ID NO: 470 - DNA, 27 bp, synthetic construct
  source 1..27: mol_type = other DNA
cacttacacctagatgaaatgaacagt

SEQ ID NO: 471 - DNA, 27 bp, synthetic construct
  source 1..27: mol_type = other DNA
atttcctttacttctcttccttacagt

SEQ ID NO: 472 - DNA, 27 bp, synthetic construct
  source 1..27: mol_type = other DNA
ccttacagtcttctgggagtaaagaat

SEQ ID NO: 473 - DNA, 27 bp, synthetic construct
  source 1..27: mol_type = other DNA
actcctttaacaaaagtcacattcaat

SEQ ID NO: 474 - DNA, 27 bp, synthetic construct
  source 1..27: mol_type = other DNA
cttctcctccaaagtcaactcccgggt

SEQ ID NO: 475 - DNA, 27 bp, synthetic construct
  source 1..27: mol_type = other DNA
tcctccaaagtcaactcccgggtaaat

SEQ ID NO: 476 - DNA, 27 bp, synthetic construct
  source 1..27: mol_type = other DNA
attaccaggtaaagttcttttgcaggt

SEQ ID NO: 477 - DNA, 27 bp, synthetic construct
  source 1..27: mol_type = other DNA
tcgattttccatacatttgtatagaat

SEQ ID NO: 478 - DNA, 27 bp, synthetic construct
  source 1..27: mol_type = other DNA
caacctgtgaactcacagagagaagat

SEQ ID NO: 479 - DNA, 27 bp, synthetic construct
  source 1..27: mol_type = other DNA
ttgttcctgaatgggaagaaaagaggt

SEQ ID NO: 480 - DNA, 27 bp, synthetic construct
  source 1..27: mol_type = other DNA
actcaccggtactctgccttgtgaaat

SEQ ID NO: 481 - DNA, 27 bp, synthetic construct
  source 1..27: mol_type = other DNA
tcctctcatatcaactcctttataaat

SEQ ID NO: 482 - DNA, 27 bp, synthetic construct
  source 1..27: mol_type = other DNA
cttttaccttttctccatgtcattgat

SEQ ID NO: 483 - DNA, 27 bp, synthetic construct
  source 1..27: mol_type = other DNA
gacatcctgtgacagaaccataaaaat

SEQ ID NO: 484 - DNA, 27 bp, synthetic construct
  source 1..27: mol_type = other DNA
tcctgtgacagaaccataaaaattaat

SEQ ID NO: 485 - DNA, 27 bp, synthetic construct
  source 1..27: mol_type = other DNA
aaacatttcacaaggcagagtaccggt

SEQ ID NO: 486 - DNA, 27 bp, synthetic construct
  source 1..27: mol_type = other DNA
atttcacaaggcagagtaccggtgagt

SEQ ID NO: 487 - DNA, 27 bp, synthetic construct
  source 1..27: mol_type = other DNA
cattcaggaacaattgcctattaaagt

SEQ ID NO: 488 - DNA, 27 bp, synthetic construct
  source 1..27: mol_type = other DNA
tgacacagaaccctgccattctaaaat

SEQ ID NO: 489 - DNA, 27 bp, synthetic construct
  source 1..27: mol_type = other DNA
actgtaaggaagagaagtaaaggaaat

SEQ ID NO: 490 - DNA, 27 bp, synthetic construct
  source 1..27: mol_type = other DNA
catctaggtgtaagtgtttcttaagat

SEQ ID NO: 491 - DNA, 27 bp, synthetic construct
  source 1..27: mol_type = other DNA
tcactgctgcccactgctttgatgggt

SEQ ID NO: 492 - DNA, 27 bp, synthetic construct
  source 1..27: mol_type = other DNA
tgctgcccactgctttgatgggtaagt

SEQ ID NO: 493 - DNA, 27 bp, synthetic construct
  source 1..27: mol_type = other DNA
ttctctcctaggcttcccctgcaggat

SEQ ID NO: 494 - DNA, 27 bp, synthetic construct
  source 1..27: mol_type = other DNA
ttatgtttcagaattccaaaaaccaat

SEQ ID NO: 495 - DNA, 27 bp, synthetic construct
  source 1..27: mol_type = other DNA
tggttactcacaggtgaaatccaaaat

SEQ ID NO: 496 - DNA, 27 bp, synthetic construct
  source 1..27: mol_type = other DNA
tccactgtgactcagggagattcaggt

SEQ ID NO: 497 - DNA, 27 bp, synthetic construct
  source 1..27: mol_type = other DNA
actgtgactcagggagattcaggtggt

SEQ ID NO: 498 - DNA, 27 bp, synthetic construct
  source 1..27: mol_type = other DNA
accacctgaatctccctgagtcacagt

SEQ ID NO: 499 - DNA, 27 bp, synthetic construct
  source 1..27: mol_type = other DNA
catccaacacttacccatcaaagcagt

SEQ ID NO: 500 - DNA, 27 bp, synthetic construct
  source 1..27: mol_type = other DNA
aggttactcaccagagttgtccccagt

SEQ ID NO: 501 - DNA, 27 bp, synthetic construct
  source 1..27: mol_type = other DNA
cacttacacctagatgaaatgaacagt

SEQ ID NO: 502 - DNA, 27 bp, synthetic construct
  source 1..27: mol_type = other DNA
atttcctttacttctcttccttacagt

SEQ ID NO: 503 - DNA, 27 bp, synthetic construct
  source 1..27: mol_type = other DNA
ttctcttccttacagtcttctgggagt

SEQ ID NO: 504 - DNA, 27 bp, synthetic construct
  source 1..27: mol_type = other DNA
ccttacagtcttctgggagtaaagaat

SEQ ID NO: 505 - DNA, 27 bp, synthetic construct
  source 1..27: mol_type = other DNA
actcaccggtactctgccttgtgaaat

SEQ ID NO: 506 - DNA, 27 bp, synthetic construct
  source 1..27: mol_type = other DNA
aaattcacaacttaccacttatttgat

SEQ ID NO: 507 - DNA, 27 bp, synthetic construct
  source 1..27: mol_type = other DNA
cttttaccttttctccatgtcattgat

SEQ ID NO: 508 - DNA, 23 bp, synthetic construct
  source 1..23: mol_type = other DNA
catttcacaaggcagagtaccgg

SEQ ID NO: 509 - DNA, 23 bp, synthetic construct
  source 1..23: mol_type = other DNA
actgtaaggaagagaagtaaagg

SEQ ID NO: 510 - DNA, 23 bp, synthetic construct
  source 1..23: mol_type = other DNA
actgctgcccactgctttgatgg

SEQ ID NO: 511 - DNA, 23 bp, synthetic construct
  source 1..23: mol_type = other DNA
ctgctgcccactgctttgatggg

SEQ ID NO: 512 - DNA, 23 bp, synthetic construct
  source 1..23: mol_type = other DNA
ctctcctaggcttcccctgcagg

SEQ ID NO: 513 - DNA, 23 bp, synthetic construct
  source 1..23: mol_type = other DNA
actgtgactcagggagattcagg

SEQ ID NO: 514 - DNA, 23 bp, synthetic construct
  source 1..23: mol_type = other DNA
gtgactcagggagattcaggtgg

SEQ ID NO: 515 - DNA, 23 bp, synthetic construct
  source 1..23: mol_type = other DNA
tgaatctccctgagtcacagtgg

SEQ ID NO: 516 - DNA, 23 bp, synthetic construct
  source 1..23: mol_type = other DNA
tacataccagtgtaattcaaagg

SEQ ID NO: 517 - DNA, 23 bp, synthetic construct
  source 1..23: mol_type = other DNA
acacttacccatcaaagcagtgg

SEQ ID NO: 518 - DNA, 23 bp, synthetic construct
  source 1..23: mol_type = other DNA
cacttacccatcaaagcagtggg

SEQ ID NO: 519 - DNA, 23 bp, synthetic construct
  source 1..23: mol_type = other DNA
tacaattaccaatttctgaaagg

SEQ ID NO: 520 - DNA, 23 bp, synthetic construct
  source 1..23: mol_type = other DNA
acaattaccaatttctgaaaggg

SEQ ID NO: 521 - DNA, 23 bp, synthetic construct
  source 1..23: mol_type = other DNA
acttttaaaataggtttggttgc

SEQ ID NO: 522 - DNA, 23 bp, synthetic construct
  source 1..23: mol_type = other DNA
tcttcccattcaggaacaattgc

SEQ ID NO: 523 - DNA, 23 bp, synthetic construct
  source 1..23: mol_type = other DNA
tttctctcctaggcttcccctgc

SEQ ID NO: 524 - DNA, 23 bp, synthetic construct
  source 1..23: mol_type = other DNA
cttacctttctccttcgagaagc

SEQ ID NO: 525 - DNA, 23 bp, synthetic construct
  source 1..23: mol_type = other DNA
ataccagtgtaattcaaaggagc

SEQ ID NO: 526 - DNA, 23 bp, synthetic construct
  source 1..23: mol_type = other DNA
atccaacacttacccatcaaagc

SEQ ID NO: 527 - DNA, 23 bp, synthetic construct
  source 1..23: mol_type = other DNA
acttacccatcaaagcagtgggc

SEQ ID NO: 528 - DNA, 23 bp, synthetic construct
  source 1..23: mol_type = other DNA
attaccaggtaaagttcttttgc

SEQ ID NO: 529 - DNA, 23 bp, synthetic construct
  source 1..23: mol_type = other DNA
caattaccaatttctgaaagggc

SEQ ID NO: 530 - DNA, 23 bp, synthetic construct
  source 1..23: mol_type = other DNA
aattgtactcaccggtactctgc

SEQ ID NO: 531 - DNA, 23 bp, synthetic construct
  source 1..23: mol_type = other DNA
cacttaccacaggaaactgtagc

SEQ ID NO: 532 - DNA, 23 bp, synthetic construct
  source 1..23: mol_type = other DNA
aaataggtttggttgcttcttga

SEQ ID NO: 533 - DNA, 23 bp, synthetic construct
  source 1..23: mol_type = other DNA
tttcttgtacagcttgccatcga

SEQ ID NO: 534 - DNA, 23 bp, synthetic construct
  source 1..23: mol_type = other DNA
tcttgtacagcttgccatcgaga

SEQ ID NO: 535 - DNA, 23 bp, synthetic construct
  source 1..23: mol_type = other DNA
ttcacaaggcagagtaccggtga

SEQ ID NO: 536 - DNA, 23 bp, synthetic construct
  source 1..23: mol_type = other DNA
tgagttcacaggttgccacatga

SEQ ID NO: 537 - DNA, 23 bp, synthetic construct
  source 1..23: mol_type = other DNA
ctgtaaggaagagaagtaaagga

SEQ ID NO: 538 - DNA, 23 bp, synthetic construct
  source 1..23: mol_type = other DNA
ctaggtgtaagtgtttcttaaga

SEQ ID NO: 539 - DNA, 23 bp, synthetic construct
  source 1..23: mol_type = other DNA
caagcacacgcattgttggagga

SEQ ID NO: 540 - DNA, 23 bp, synthetic construct
  source 1..23: mol_type = other DNA
tctcctaggcttcccctgcagga

SEQ ID NO: 541 - DNA, 23 bp, synthetic construct
  source 1..23: mol_type = other DNA
agggaatcatgatatcgccttga

SEQ ID NO: 542 - DNA, 23 bp, synthetic construct
  source 1..23: mol_type = other DNA
tcatgcttacctttctccttcga

SEQ ID NO: 543 - DNA, 23 bp, synthetic construct
  source 1..23: mol_type = other DNA
atgcttacctttctccttcgaga

SEQ ID NO: 544 - DNA, 23 bp, synthetic construct
  source 1..23: mol_type = other DNA
acataccagtgtaattcaaagga

SEQ ID NO: 545 - DNA, 23 bp, synthetic construct
  source 1..23: mol_type = other DNA
acacttacacctagatgaaatga

SEQ ID NO: 546 - DNA, 23 bp, synthetic construct
  source 1..23: mol_type = other DNA
ctcttccttacagtcttctggga

SEQ ID NO: 547 - DNA, 23 bp, synthetic construct
  source 1..23: mol_type = other DNA
ttacagtcttctgggagtaaaga

SEQ ID NO: 548 - DNA, 23 bp, synthetic construct
  source 1..23: mol_type = other DNA
gtcctacaattaccaatttctga

SEQ ID NO: 549 - DNA, 23 bp, synthetic construct
  source 1..23: mol_type = other DNA
ctcaccggtactctgccttgtga

SEQ ID NO: 550 - DNA, 23 bp, synthetic construct
  source 1..23: mol_type = other DNA
ttcacaacttaccacttatttga

SEQ ID NO: 551 - DNA, 23 bp, synthetic construct
  source 1..23: mol_type = other DNA
acaacttaccacttatttgatga

SEQ ID NO: 552 - DNA, 23 bp, synthetic construct
  source 1..23: mol_type = other DNA
ttaccttttctccatgtcattga

SEQ ID NO: 553 - DNA, 24 bp, synthetic construct
  source 1..24: mol_type = other DNA
gttctgtcacaggatgtctgactc

SEQ ID NO: 554 - DNA, 24 bp, synthetic construct
  source 1..24: mol_type = other DNA
cttttaaaataggtttggttgctt

SEQ ID NO: 555 - DNA, 24 bp, synthetic construct
  source 1..24: mol_type = other DNA
atttcacaaggcagagtaccggtg

SEQ ID NO: 556 - DNA, 24 bp, synthetic construct
  source 1..24: mol_type = other DNA
cttcccattcaggaacaattgcct

SEQ ID NO: 557 - DNA, 24 bp, synthetic construct
  source 1..24: mol_type = other DNA
attgacacagaaccctgccattct

SEQ ID NO: 558 - DNA, 24 bp, synthetic construct
  source 1..24: mol_type = other DNA
atttcatctaggtgtaagtgtttc

SEQ ID NO: 559 - DNA, 24 bp, synthetic construct
  source 1..24: mol_type = other DNA
attatgtttcagaattccaaaaac

SEQ ID NO: 560 - DNA, 24 bp, synthetic construct
  source 1..24: mol_type = other DNA
gttactcacaggtgaaatccaaaa

SEQ ID NO: 561 - DNA, 24 bp, synthetic construct
  source 1..24: mol_type = other DNA
gttcctccaacaatgcgtgtgctt

SEQ ID NO: 562 - DNA, 24 bp, synthetic construct
  source 1..24: mol_type = other DNA
atttcctttacttctcttccttac

SEQ ID NO: 563 - DNA, 24 bp, synthetic construct
  source 1..24: mol_type = other DNA
cttccttacagtcttctgggagta

SEQ ID NO: 564 - DNA, 24 bp, synthetic construct
  source 1..24: mol_type = other DNA
attgtactcaccggtactctgcct

SEQ ID NO: 565 - DNA, 24 bp, synthetic construct
  source 1..24: mol_type = other DNA
attcacaacttaccacttatttga

SEQ ID NO: 566 - DNA, 24 bp, synthetic construct
  source 1..24: mol_type = other DNA
attcacttaccacaggaaactgta

SEQ ID NO: 567 - RNA, 20 nt, synthetic construct
  source 1..20: mol_type = other RNA
cttacctttctccttcgaga

SEQ ID NO: 568 - RNA, 20 nt, synthetic construct
  source 1..20: mol_type = other RNA
ataccagtgtaattcaaagg

SEQ ID NO: 569 - RNA, 20 nt, synthetic construct
  source 1..20: mol_type = other RNA
acttacccatcaaagcagtg

SEQ ID NO: 570 - RNA, 20 nt, synthetic construct
  source 1..20: mol_type = other RNA
attaccaggtaaagttcttt

SEQ ID NO: 571 - RNA, 20 nt, synthetic construct
  source 1..20: mol_type = other RNA
caattaccaatttctgaaag

SEQ ID NO: 572 - RNA, 20 nt, synthetic construct
  source 1..20: mol_type = other RNA
cacttaccacaggaaactgt

SEQ ID NO: 573 - RNA, 20 nt, synthetic construct
  source 1..20: mol_type = other RNA
catttcacaaggcagagtac

SEQ ID NO: 574 - RNA, 20 nt, synthetic construct
  source 1..20: mol_type = other RNA
actgtaaggaagagaagtaa

SEQ ID NO: 575 - RNA, 20 nt, synthetic construct
  source 1..20: mol_type = other RNA
ctctcctaggcttcccctgc

SEQ ID NO: 576 - RNA, 20 nt, synthetic construct
  source 1..20: mol_type = other RNA
gtgactcagggagattcagg

SEQ ID NO: 577 - RNA, 20 nt, synthetic construct
  source 1..20: mol_type = other RNA
tgaatctccctgagtcacag

SEQ ID NO: 578 - RNA, 20 nt, synthetic construct
  source 1..20: mol_type = other RNA
tacataccagtgtaattcaa

SEQ ID NO: 579 - RNA, 20 nt, synthetic construct
  source 1..20: mol_type = other RNA
acacttacccatcaaagcag

SEQ ID NO: 580 - RNA, 20 nt, synthetic construct
  source 1..20: mol_type = other RNA
cacttacccatcaaagcagt

SEQ ID NO: 581 - RNA, 20 nt, synthetic construct
  source 1..20: mol_type = other RNA
tacaattaccaatttctgaa

SEQ ID NO: 582 - RNA, 20 nt, synthetic construct
  source 1..20: mol_type = other RNA
acaattaccaatttctgaaa

SEQ ID NO: 583 - RNA, 20 nt, synthetic construct
  source 1..20: mol_type = other RNA
aaataggtttggttgcttct

SEQ ID NO: 584 - RNA, 20 nt, synthetic construct
  source 1..20: mol_type = other RNA
tcttgtacagcttgccatcg

SEQ ID NO: 585 - RNA, 20 nt, synthetic construct
  source 1..20: mol_type = other RNA
ttcacaaggcagagtaccgg

SEQ ID NO: 586 - RNA, 20 nt, synthetic construct
  source 1..20: mol_type = other RNA
ctgtaaggaagagaagtaaa

SEQ ID NO: 587 - RNA, 20 nt, synthetic construct
  source 1..20: mol_type = other RNA
ctaggtgtaagtgtttctta

SEQ ID NO: 588 - RNA, 20 nt, synthetic construct
  source 1..20: mol_type = other RNA
tctcctaggcttcccctgca

SEQ ID NO: 589 - RNA, 20 nt, synthetic construct
  source 1..20: mol_type = other RNA
tcatgcttacctttctcctt

SEQ ID NO: 590 - RNA, 20 nt, synthetic construct
  source 1..20: mol_type = other RNA
atgcttacctttctccttcg

SEQ ID NO: 591 - RNA, 20 nt, synthetic construct
  source 1..20: mol_type = other RNA
acataccagtgtaattcaaa

SEQ ID NO: 592 - RNA, 20 nt, synthetic construct
  source 1..20: mol_type = other RNA
acacttacacctagatgaaa

SEQ ID NO: 593 - RNA, 20 nt, synthetic construct
  source 1..20: mol_type = other RNA
ttacagtcttctgggagtaa

SEQ ID NO: 594 - RNA, 20 nt, synthetic construct
  source 1..20: mol_type = other RNA
ctcaccggtactctgccttg

SEQ ID NO: 595 - RNA, 20 nt, synthetic construct
  source 1..20: mol_type = other RNA
acaacttaccacttatttga

SEQ ID NO: 596 - RNA, 20 nt, synthetic construct
  source 1..20: mol_type = other RNA
ttaccttttctccatgtcat

SEQ ID NO: 597 - RNA, 21 nt, synthetic construct
  source 1..21: mol_type = other RNA
atttcacaaggcagagtaccg

SEQ ID NO: 598 - RNA, 21 nt, synthetic construct
  source 1..21: mol_type = other RNA
tcactgctgcccactgctttg

SEQ ID NO: 599 - RNA, 21 nt, synthetic construct
  source 1..21: mol_type = other RNA
ttctctcctaggcttcccctg

SEQ ID NO: 600 - RNA, 21 nt, synthetic construct
  source 1..21: mol_type = other RNA
ttctcttccttacagtcttct

SEQ ID NO: 601 - RNA, 21 nt, synthetic construct
  source 1..21: mol_type = other RNA
ccttacagtcttctgggagta

SEQ ID NO: 602 - RNA, 21 nt, synthetic construct
  source 1..21: mol_type = other RNA
tcatcaaataagtggtaagtt

SEQ ID NO: 603 - RNA, 21 nt, synthetic construct
  source 1..21: mol_type = other RNA
ttgccatcgagacatttataa

SEQ ID NO: 604 - RNA, 21 nt, synthetic construct
  source 1..21: mol_type = other RNA
ccacgcaaacatttcacaagg

SEQ ID NO: 605 - RNA, 21 nt, synthetic construct
  source 1..21: mol_type = other RNA
atttcacaaggcagagtaccg

SEQ ID NO: 606 - RNA, 21 nt, synthetic construct
  source 1..21: mol_type = other RNA
ctcctcaagaaaacaccatat

SEQ ID NO: 607 - RNA, 21 nt, synthetic construct
  source 1..21: mol_type = other RNA
cagctcagaggcacctgtgtg

SEQ ID NO: 608 - RNA, 21 nt, synthetic construct
  source 1..21: mol_type = other RNA
tcactgctgcccactgctttg

SEQ ID NO: 609 - RNA, 21 nt, synthetic construct
  source 1..21: mol_type = other RNA
gtgaggacccactggtgtcct

SEQ ID NO: 610 - RNA, 21 nt, synthetic construct
  source 1..21: mol_type = other RNA
gccagggccactctccccaag

SEQ ID NO: 611 - RNA, 21 nt, synthetic construct
  source 1..21: mol_type = other RNA
ccttacagtcttctgggagta

SEQ ID NO: 612 - RNA, 21 nt, synthetic construct
  source 1..21: mol_type = other RNA
cttctcctccaaagtcaactc

SEQ ID NO: 613 - RNA, 21 nt, synthetic construct
  source 1..21: mol_type = other RNA
tcgattttccatacatttgta

SEQ ID NO: 614 - RNA, 21 nt, synthetic construct
  source 1..21: mol_type = other RNA
caaatgcccaatactgccaga

SEQ ID NO: 615 - RNA, 21 nt, synthetic construct
  source 1..21: mol_type = other RNA
ttccttgaagcaatgtggtca

SEQ ID NO: 616 - RNA, 21 nt, synthetic construct
  source 1..21: mol_type = other RNA
ttgaagcaatgtggtcatcaa

SEQ ID NO: 617 - RNA, 21 nt, synthetic construct
  source 1..21: mol_type = other RNA
aagcaatgtggtcatcaaata

SEQ ID NO: 618 - RNA, 21 nt, synthetic construct
  source 1..21: mol_type = other RNA
aatgtggtcatcaaataagtg

SEQ ID NO: 619 - RNA, 21 nt, synthetic construct
  source 1..21: mol_type = other RNA
tcatcaaataagtggtaagtt

SEQ ID NO: 620 - RNA, 21 nt, synthetic construct
  source 1..21: mol_type = other RNA
ttgccatcgagacatttataa

SEQ ID NO: 621 - RNA, 21 nt, synthetic construct
  source 1..21: mol_type = other RNA
catcgagacatttataaagga

SEQ ID NO: 622 - RNA, 21 nt, synthetic construct
  source 1..21: mol_type = other RNA
gaagaatgccaaaaaaggtgc

SEQ ID NO: 623 - RNA, 21 nt, synthetic construct
  source 1..21: mol_type = other RNA
ccacgcaaacatttcacaagg

SEQ ID NO: 624 - RNA, 21 nt, synthetic construct
  source 1..21: mol_type = other RNA
atttcacaaggcagagtaccg

SEQ ID NO: 625 - RNA, 21 nt, synthetic construct
  source 1..21: mol_type = other RNA
acaaggcagagtaccggtgag

SEQ ID NO: 626 - RNA, 21 nt, synthetic construct
  source 1..21: mol_type = other RNA
atcttccagcatcttgcgttc

SEQ ID NO: 627 - RNA, 21 nt, synthetic construct
  source 1..21: mol_type = other RNA
tcacaaaggcgagtatgcatg

SEQ ID NO: 628 - RNA, 21 nt, synthetic construct
  source 1..21: mol_type = other RNA
ctcctcaagaaaacaccatat

SEQ ID NO: 629 - RNA, 21 nt, synthetic construct
  source 1..21: mol_type = other RNA
tgtttgccaagagacttgcac

SEQ ID NO: 630 - RNA, 21 nt, synthetic construct
  source 1..21: mol_type = other RNA
ttgccaagagacttgcacaaa

SEQ ID NO: 631 - RNA, 21 nt, synthetic construct
  source 1..21: mol_type = other RNA
tcccagaagactgtaaggaag

SEQ ID NO: 632 - RNA, 21 nt, synthetic construct
  source 1..21: mol_type = other RNA
gtggccctggcaggtgagcct

SEQ ID NO: 633 - RNA, 21 nt, synthetic construct
  source 1..21: mol_type = other RNA
cagctcagaggcacctgtgtg

SEQ ID NO: 634 - RNA, 21 nt, synthetic construct
  source 1..21: mol_type = other RNA
tcactgctgcccactgctttg

SEQ ID NO: 635 - RNA, 21 nt, synthetic construct
  source 1..21: mol_type = other RNA
tgctgcccactgctttgatgg

SEQ ID NO: 636 - RNA, 21 nt, synthetic construct
  source 1..21: mol_type = other RNA
ctgcaggatgtttggcgcatc

SEQ ID NO: 637 - RNA, 21 nt, synthetic construct
  source 1..21: mol_type = other RNA
ctccaggctcctttgaattac

SEQ ID NO: 638 - RNA, 21 nt, synthetic construct
  source 1..21: mol_type = other RNA
tgaaatccaaaatattctaca

SEQ ID NO: 639 - RNA, 21 nt, synthetic construct
  source 1..21: mol_type = other RNA
atccaaaatattctacaaaag

SEQ ID NO: 640 - RNA, 21 nt, synthetic construct
  source 1..21: mol_type = other RNA
tctacaaaaggtaaatattcc

SEQ ID NO: 641 - RNA, 21 nt, synthetic construct
  source 1..21: mol_type = other RNA
gaagaatgccagaaaagatat

SEQ ID NO: 642 - RNA, 21 nt, synthetic construct
  source 1..21: mol_type = other RNA
tcagggagattcaggtggtcc

SEQ ID NO: 643 - RNA, 21 nt, synthetic construct
  source 1..21: mol_type = other RNA
ggagcaacctggtgtctacac

SEQ ID NO: 644 - RNA, 21 nt, synthetic construct
  source 1..21: mol_type = other RNA
gatgcagtcaccagcatgaga

SEQ ID NO: 645 - RNA, 21 nt, synthetic construct
  source 1..21: mol_type = other RNA
aatctccctgagtcacagtgg

SEQ ID NO: 646 - RNA, 21 nt, synthetic construct
  source 1..21: mol_type = other RNA
ccctgagtcacagtggaaaaa

SEQ ID NO: 647 - RNA, 21 nt, synthetic construct
  source 1..21: mol_type = other RNA
agaagccccatccggttaccc

SEQ ID NO: 648 - RNA, 21 nt, synthetic construct
  source 1..21: mol_type = other RNA
gccccatccggttacccaaca

SEQ ID NO: 649 - RNA, 21 nt, synthetic construct
  source 1..21: mol_type = other RNA
tccggttacccaacagttggt

SEQ ID NO: 650 - RNA, 21 nt, synthetic construct
  source 1..21: mol_type = other RNA
tggaattctgaaacataattt

SEQ ID NO: 651 - RNA, 21 nt, synthetic construct
  source 1..21: mol_type = other RNA
ggggaagcctaggagagaaaa

SEQ ID NO: 652 - RNA, 21 nt, synthetic construct
  source 1..21: mol_type = other RNA
ttacccatcaaagcagtgggc

SEQ ID NO: 653 - RNA, 21 nt, synthetic construct
  source 1..21: mol_type = other RNA
gtgaggacccactggtgtcct

SEQ ID NO: 654 - RNA, 21 nt, synthetic construct
  source 1..21: mol_type = other RNA
gccagggccactctccccaag

SEQ ID NO: 655 - RNA, 21 nt, synthetic construct
  source 1..21: mol_type = other RNA
gactgaaaagagagcgttgac

SEQ ID NO: 656 - RNA, 21 nt, synthetic construct
  source 1..21: mol_type = other RNA
aggttactcaccagagttgtc

SEQ ID NO: 657 - RNA, 21 nt, synthetic construct
  source 1..21: mol_type = other RNA
cacttacacctagatgaaatg

SEQ ID NO: 658 - RNA, 21 nt, synthetic construct
  source 1..21: mol_type = other RNA
atttcctttacttctcttcct

SEQ ID NO: 659 - RNA, 21 nt, synthetic construct
  source 1..21: mol_type = other RNA
ccttacagtcttctgggagta

SEQ ID NO: 660 - RNA, 21 nt, synthetic construct
  source 1..21: mol_type = other RNA
actcctttaacaaaagtcaca

SEQ ID NO: 661 - RNA, 21 nt, synthetic construct
  source 1..21: mol_type = other RNA
cttctcctccaaagtcaactc

SEQ ID NO: 662 - RNA, 21 nt, synthetic construct
  source 1..21: mol_type = other RNA
tcctccaaagtcaactcccgg

SEQ ID NO: 663 - RNA, 21 nt, synthetic construct
  source 1..21: mol_type = other RNA
attaccaggtaaagttctttt

SEQ ID NO: 664 - RNA, 21 nt, synthetic construct
  source 1..21: mol_type = other RNA
tcgattttccatacatttgta

SEQ ID NO: 665 - RNA, 21 nt, synthetic construct
  source 1..21: mol_type = other RNA
caacctgtgaactcacagaga

SEQ ID NO: 666 - RNA, 21 nt, synthetic construct
  source 1..21: mol_type = other RNA
ttgttcctgaatgggaagaaa

SEQ ID NO: 667 - RNA, 21 nt, synthetic construct
  source 1..21: mol_type = other RNA
actcaccggtactctgccttg

SEQ ID NO: 668 - RNA, 21 nt, synthetic construct
  source 1..21: mol_type = other RNA
tcctctcatatcaactccttt

SEQ ID NO: 669 - RNA, 21 nt, synthetic construct
  source 1..21: mol_type = other RNA
cttttaccttttctccatgtc

SEQ ID NO: 670 - RNA, 21 nt, synthetic construct
  source 1..21: mol_type = other RNA
gacatcctgtgacagaaccat

SEQ ID NO: 671 - RNA, 21 nt, synthetic construct
  source 1..21: mol_type = other RNA
tcctgtgacagaaccataaaa

SEQ ID NO: 672 - RNA, 21 nt, synthetic construct
  source 1..21: mol_type = other RNA
aaacatttcacaaggcagagt

SEQ ID NO: 673 - RNA, 21 nt, synthetic construct
  source 1..21: mol_type = other RNA
atttcacaaggcagagtaccg

SEQ ID NO: 674 - RNA, 21 nt, synthetic construct
  source 1..21: mol_type = other RNA
cattcaggaacaattgcctat

SEQ ID NO: 675 - RNA, 21 nt, synthetic construct
  source 1..21: mol_type = other RNA
tgacacagaaccctgccattc

SEQ ID NO: 676 - RNA, 21 nt, synthetic construct
  source 1..21: mol_type = other RNA
actgtaaggaagagaagtaaa

SEQ ID NO: 677 - RNA, 21 nt, synthetic construct
  source 1..21: mol_type = other RNA
catctaggtgtaagtgtttct

SEQ ID NO: 678 - RNA, 21 nt, synthetic construct
  source 1..21: mol_type = other RNA
tcactgctgcccactgctttg

SEQ ID NO: 679 - RNA, 21 nt, synthetic construct
  source 1..21: mol_type = other RNA
tgctgcccactgctttgatgg

SEQ ID NO: 680 - RNA, 21 nt, synthetic construct
  source 1..21: mol_type = other RNA
ttctctcctaggcttcccctg

SEQ ID NO: 681 - RNA, 21 nt, synthetic construct
  source 1..21: mol_type = other RNA
ttatgtttcagaattccaaaa

SEQ ID NO: 682 - RNA, 21 nt, synthetic construct
  source 1..21: mol_type = other RNA
tggttactcacaggtgaaatc

SEQ ID NO: 683 - RNA, 21 nt, synthetic construct
  source 1..21: mol_type = other RNA
tccactgtgactcagggagat

SEQ ID NO: 684 - RNA, 21 nt, synthetic construct
  source 1..21: mol_type = other RNA
actgtgactcagggagattca

SEQ ID NO: 685 - RNA, 21 nt, synthetic construct
  source 1..21: mol_type = other RNA
accacctgaatctccctgagt

SEQ ID NO: 686 - RNA, 21 nt, synthetic construct
  source 1..21: mol_type = other RNA
catccaacacttacccatcaa

SEQ ID NO: 687 - RNA, 21 nt, synthetic construct
  source 1..21: mol_type = other RNA
aggttactcaccagagttgtc

SEQ ID NO: 688 - RNA, 21 nt, synthetic construct
  source 1..21: mol_type = other RNA
cacttacacctagatgaaatg

SEQ ID NO: 689 - RNA, 21 nt, synthetic construct
  source 1..21: mol_type = other RNA
atttcctttacttctcttcct

SEQ ID NO: 690 - RNA, 21 nt, synthetic construct
  source 1..21: mol_type = other RNA
ttctcttccttacagtcttct

SEQ ID NO: 691 - RNA, 21 nt, synthetic construct
  source 1..21: mol_type = other RNA
ccttacagtcttctgggagta

SEQ ID NO: 692 - RNA, 21 nt, synthetic construct
  source 1..21: mol_type = other RNA
actcaccggtactctgccttg

SEQ ID NO: 693 - RNA, 21 nt, synthetic construct
  source 1..21: mol_type = other RNA
aaattcacaacttaccactta

SEQ ID NO: 694 - RNA, 21 nt, synthetic construct
  source 1..21: mol_type = other RNA
cttttaccttttctccatgtc

SEQ ID NO: 695 - RNA, 20 nt, synthetic construct
  source 1..20: mol_type = other RNA
catttcacaaggcagagtac

SEQ ID NO: 696 - RNA, 20 nt, synthetic construct
  source 1..20: mol_type = other RNA
actgtaaggaagagaagtaa

SEQ ID NO: 697 - RNA, 20 nt, synthetic construct
  source 1..20: mol_type = other RNA
actgctgcccactgctttga

SEQ ID NO: 698 - RNA, 20 nt, synthetic construct
  source 1..20: mol_type = other RNA
ctgctgcccactgctttgat

SEQ ID NO: 699 - RNA, 20 nt, synthetic construct
  source 1..20: mol_type = other RNA
ctctcctaggcttcccctgc

SEQ ID NO: 700 - RNA, 20 nt, synthetic construct
  source 1..20: mol_type = other RNA
actgtgactcagggagattc

SEQ ID NO: 701 - RNA, 20 nt, synthetic construct
  source 1..20: mol_type = other RNA
gtgactcagggagattcagg

SEQ ID NO: 702 - RNA, 20 nt, synthetic construct
  source 1..20: mol_type = other RNA
tgaatctccctgagtcacag

SEQ ID NO: 703 - RNA, 20 nt, synthetic construct
  source 1..20: mol_type = other RNA
tacataccagtgtaattcaa

SEQ ID NO: 704 - RNA, 20 nt, synthetic construct
  source 1..20: mol_type = other RNA
acacttacccatcaaagcag

SEQ ID NO: 705 - RNA, 20 nt, synthetic construct
  source 1..20: mol_type = other RNA
cacttacccatcaaagcagt

SEQ ID NO: 706 - RNA, 20 nt, synthetic construct
  source 1..20: mol_type = other RNA
tacaattaccaatttctgaa

SEQ ID NO: 707 - RNA, 20 nt, synthetic construct
  source 1..20: mol_type = other RNA
acaattaccaatttctgaaa

SEQ ID NO: 708 - RNA, 20 nt, synthetic construct
  source 1..20: mol_type = other RNA
acttttaaaataggtttggt

SEQ ID NO: 709 - RNA, 20 nt, synthetic construct
  source 1..20: mol_type = other RNA
tcttcccattcaggaacaat

SEQ ID NO: 710 - RNA, 20 nt, synthetic construct
  source 1..20: mol_type = other RNA
tttctctcctaggcttcccc

SEQ ID NO: 711 - RNA, 20 nt, synthetic construct
  source 1..20: mol_type = other RNA
cttacctttctccttcgaga

SEQ ID NO: 712 - RNA, 20 nt, synthetic construct
  source 1..20: mol_type = other RNA
ataccagtgtaattcaaagg

SEQ ID NO: 713 - RNA, 20 nt, synthetic construct
  source 1..20: mol_type = other RNA
atccaacacttacccatcaa

SEQ ID NO: 714 - RNA, 20 nt, synthetic construct
  source 1..20: mol_type = other RNA
acttacccatcaaagcagtg

SEQ ID NO: 715 - RNA, 20 nt, synthetic construct
  source 1..20: mol_type = other RNA
attaccaggtaaagttcttt

SEQ ID NO: 716 - RNA, 20 nt, synthetic construct
  source 1..20: mol_type = other RNA
caattaccaatttctgaaag

SEQ ID NO: 717 - RNA, 20 nt, synthetic construct
  source 1..20: mol_type = other RNA
aattgtactcaccggtactc

SEQ ID NO: 718 - RNA, 20 nt, synthetic construct
  source 1..20: mol_type = other RNA
cacttaccacaggaaactgt

SEQ ID NO: 719 - RNA, 20 nt, synthetic construct
  source 1..20: mol_type = other RNA
aaataggtttggttgcttct

SEQ ID NO: 720 - RNA, 20 nt, synthetic construct
  source 1..20: mol_type = other RNA
tttcttgtacagcttgccat

SEQ ID NO: 721 - RNA, 20 nt, synthetic construct
  source 1..20: mol_type = other RNA
tcttgtacagcttgccatcg

SEQ ID NO: 722 - RNA, 20 nt, synthetic construct
  source 1..20: mol_type = other RNA
ttcacaaggcagagtaccgg

SEQ ID NO: 723 - RNA, 20 nt, synthetic construct
  source 1..20: mol_type = other RNA
tgagttcacaggttgccaca

SEQ ID NO: 724 - RNA, 20 nt, synthetic construct
  source 1..20: mol_type = other RNA
ctgtaaggaagagaagtaaa

SEQ ID NO: 725 - RNA, 20 nt, synthetic construct
  source 1..20: mol_type = other RNA
ctaggtgtaagtgtttctta

SEQ ID NO: 726 - RNA, 20 nt, synthetic construct
  source 1..20: mol_type = other RNA
caagcacacgcattgttgga

SEQ ID NO: 727 - RNA, 20 nt, synthetic construct
  source 1..20: mol_type = other RNA
tctcctaggcttcccctgca

SEQ ID NO: 728 - RNA, 20 nt, synthetic construct
  source 1..20: mol_type = other RNA
agggaatcatgatatcgcct

SEQ ID NO: 729 - RNA, 20 nt, synthetic construct
  source 1..20: mol_type = other RNA
tcatgcttacctttctcctt

SEQ ID NO: 730 - RNA, 20 nt, synthetic construct
  source 1..20: mol_type = other RNA
atgcttacctttctccttcg

SEQ ID NO: 731 - RNA, 20 nt, synthetic construct
  source 1..20: mol_type = other RNA
acataccagtgtaattcaaa

SEQ ID NO: 732 - RNA, 20 nt, synthetic construct
  source 1..20: mol_type = other RNA
acacttacacctagatgaaa

SEQ ID NO: 733 - RNA, 20 nt, synthetic construct
  source 1..20: mol_type = other RNA
ctcttccttacagtcttctg

SEQ ID NO: 734 - RNA, 20 nt, synthetic construct
  source 1..20: mol_type = other RNA
ttacagtcttctgggagtaa

SEQ ID NO: 735 - RNA, 20 nt, synthetic construct
  source 1..20: mol_type = other RNA
gtcctacaattaccaatttc

SEQ ID NO: 736 - RNA, 20 nt, synthetic construct
  source 1..20: mol_type = other RNA
ctcaccggtactctgccttg

SEQ ID NO: 737 - RNA, 20 nt, synthetic construct
  source 1..20: mol_type = other RNA
ttcacaacttaccacttatt

SEQ ID NO: 738 - RNA, 20 nt, synthetic construct
  source 1..20: mol_type = other RNA
acaacttaccacttatttga

SEQ ID NO: 739 - RNA, 20 nt, synthetic construct
  source 1..20: mol_type = other RNA
ttaccttttctccatgtcat

SEQ ID NO: 740 - RNA, 20 nt, synthetic construct
  source 1..20: mol_type = other RNA
tgtcacaggatgtctgactc

SEQ ID NO: 741 - RNA, 20 nt, synthetic construct
  source 1..20: mol_type = other RNA
taaaataggtttggttgctt

SEQ ID NO: 742 - RNA, 20 nt, synthetic construct
  source 1..20: mol_type = other RNA
cacaaggcagagtaccggtg

SEQ ID NO: 743 - RNA, 20 nt, synthetic construct
  source 1..20: mol_type = other RNA
ccattcaggaacaattgcct

SEQ ID NO: 744 - RNA, 20 nt, synthetic construct
  source 1..20: mol_type = other RNA
acacagaaccctgccattct

SEQ ID NO: 745 - RNA, 20 nt, synthetic construct
  source 1..20: mol_type = other RNA
catctaggtgtaagtgtttc

SEQ ID NO: 746 - RNA, 20 nt, synthetic construct
  source 1..20: mol_type = other RNA
tgtttcagaattccaaaaac

SEQ ID NO: 747 - RNA, 20 nt, synthetic construct
  source 1..20: mol_type = other RNA
ctcacaggtgaaatccaaaa

SEQ ID NO: 748 - RNA, 20 nt, synthetic construct
  source 1..20: mol_type = other RNA
ctccaacaatgcgtgtgctt

SEQ ID NO: 749 - RNA, 20 nt, synthetic construct
  source 1..20: mol_type = other RNA
cctttacttctcttccttac

SEQ ID NO: 750 - RNA, 20 nt, synthetic construct
  source 1..20: mol_type = other RNA
cttacagtcttctgggagta

SEQ ID NO: 751 - RNA, 20 nt, synthetic construct
  source 1..20: mol_type = other RNA
tactcaccggtactctgcct

SEQ ID NO: 752 - RNA, 20 nt, synthetic construct
  source 1..20: mol_type = other RNA
acaacttaccacttatttga

SEQ ID NO: 753 - RNA, 20 nt, synthetic construct
  source 1..20: mol_type = other RNA
acttaccacaggaaactgta

SEQ ID NO: 754 - RNA, 100 nt, synthetic construct
  source 1..100: mol_type = other RNA
cacttaccacaggaaactgtgttttagagctagaaatagcaagttaaaataaggctagtccgttatcaacttgaaaaagtggcaccgagtcggtgctttt

SEQ ID NO: 755 - RNA, 117 nt, synthetic construct
  source 1..117: mol_type = other RNA
gttctgtcttttggtcaggacaaccgtctagctataagtgctgcagggtgtgagaaactcctattgctggacgatgtctcttacgaggcattagcacacttaccacaggaaactgta

SEQ ID NO: 756 - RNA, 109 nt, synthetic construct
  source 1..109: mol_type = other RNA
tcctgtgacagaaccataaaagttttagtactctgtaatgaaaattacagaatctactaaaacaaggcaaaatgccgtgtttatctcgtcaacttgttggcgagatttt

SEQ ID NO: 757 - RNA, 109 nt, synthetic construct
  source 1..109: mol_type = other RNA
gacatcctgtgacagaaccatgttttagtactctgtaatgaaaattacagaatctactaaaacaaggcaaaatgccgtgtttatctcgtcaacttgttggcgagatttt

SEQ ID NO: 758 - RNA, 117 nt, synthetic construct
  source 1..117: mol_type = other RNA
gttctgtcttttggtcaggacaaccgtctagctataagtgctgcagggtgtgagaaactcctattgctggacgatgtctcttacgaggcattagcactgtcacaggatgtctgactc

SEQ ID NO: 759 - RNA, 109 nt, synthetic construct
  source 1..109: mol_type = other RNA
caaatgcccaatactgccagagttttagtactctgtaatgaaaattacagaatctactaaaacaaggcaaaatgccgtgtttatctcgtcaacttgttggcgagatttt

SEQ ID NO: 760 - RNA, 109 nt, synthetic construct
  source 1..109: mol_type = other RNA
cttttaccttttctccatgtcgttttagtactctgtaatgaaaattacagaatctactaaaacaaggcaaaatgccgtgtttatctcgtcaacttgttggcgagatttt

SEQ ID NO: 761 - RNA, 117 nt, synthetic construct
  source 1..117: mol_type = other RNA
gttctgtcttttggtcaggacaaccgtctagctataagtgctgcagggtgtgagaaactcctattgctggacgatgtctcttacgaggcattagcactaaaataggtttggttgctt

SEQ ID NO: 762 - RNA, 109 nt, synthetic construct
  source 1..109: mol_type = other RNA
ttccttgaagcaatgtggtcagttttagtactctgtaatgaaaattacagaatctactaaaacaaggcaaaatgccgtgtttatctcgtcaacttgttggcgagatttt

SEQ ID NO: 763 - RNA, 109 nt, synthetic construct
  source 1..109: mol_type = other RNA
ttgaagcaatgtggtcatcaagttttagtactctgtaatgaaaattacagaatctactaaaacaaggcaaaatgccgtgtttatctcgtcaacttgttggcgagatttt

SEQ ID NO: 764 - RNA, 109 nt, synthetic construct
  source 1..109: mol_type = other RNA
aagcaatgtggtcatcaaatagttttagtactctgtaatgaaaattacagaatctactaaaacaaggcaaaatgccgtgtttatctcgtcaacttgttggcgagatttt

SEQ ID NO: 765 - RNA, 109 nt, synthetic construct
  source 1..109: mol_type = other RNA
aatgtggtcatcaaataagtggttttagtactctgtaatgaaaattacagaatctactaaaacaaggcaaaatgccgtgtttatctcgtcaacttgttggcgagatttt

SEQ ID NO: 766 - RNA, 109 nt, synthetic construct
  source 1..109: mol_type = other RNA
tcatcaaataagtggtaagttgttttagtactctgtaatgaaaattacagaatctactaaaacaaggcaaaatgccgtgtttatctcgtcaacttgttggcgagatttt

SEQ ID NO: 767 - RNA, 109 nt, synthetic construct
  source 1..109: mol_type = other RNA
aaattcacaacttaccacttagttttagtactctgtaatgaaaattacagaatctactaaaacaaggcaaaatgccgtgtttatctcgtcaacttgttggcgagatttt

SEQ ID NO: 768 - RNA, 100 nt, synthetic construct
  source 1..100: mol_type = other RNA
ttcacaacttaccacttattgttttagagctagaaatagcaagttaaaataaggctagtccgttatcaacttgaaaaagtggcaccgagtcggtgctttt

SEQ ID NO: 769 - RNA, 117 nt, synthetic construct
  source 1..117: mol_type = other RNA
gttctgtcttttggtcaggacaaccgtctagctataagtgctgcagggtgtgagaaactcctattgctggacgatgtctcttacgaggcattagcacacaacttaccacttatttga

SEQ ID NO: 770 - RNA, 100 nt, synthetic construct
  source 1..100: mol_type = other RNA
tttcttgtacagcttgccatgttttagagctagaaatagcaagttaaaataaggctagtccgttatcaacttgaaaaagtggcaccgagtcggtgctttt

SEQ ID NO: 771 - RNA, 109 nt, synthetic construct
  source 1..109: mol_type = other RNA
ttgccatcgagacatttataagttttagtactctgtaatgaaaattacagaatctactaaaacaaggcaaaatgccgtgtttatctcgtcaacttgttggcgagatttt

SEQ ID NO: 772 - RNA, 109 nt, synthetic construct
  source 1..109: mol_type = other RNA
catcgagacatttataaaggagttttagtactctgtaatgaaaattacagaatctactaaaacaaggcaaaatgccgtgtttatctcgtcaacttgttggcgagatttt

SEQ ID NO: 773 - RNA, 109 nt, synthetic construct
  source 1..109: mol_type = other RNA
tcctctcatatcaactcctttgttttagtactctgtaatgaaaattacagaatctactaaaacaaggcaaaatgccgtgtttatctcgtcaacttgttggcgagatttt

SEQ ID NO: 774 - RNA, 109 nt, synthetic construct
  source 1..109: mol_type = other RNA
gaagaatgccaaaaaaggtgcgttttagtactctgtaatgaaaattacagaatctactaaaacaaggcaaaatgccgtgtttatctcgtcaacttgttggcgagatttt

SEQ ID NO: 775 - RNA, 109 nt, synthetic construct
  source 1..109: mol_type = other RNA
ccacgcaaacatttcacaagggttttagtactctgtaatgaaaattacagaatctactaaaacaaggcaaaatgccgtgtttatctcgtcaacttgttggcgagatttt

SEQ ID NO: 776 - RNA, 109 nt, synthetic construct
  source 1..109: mol_type = other RNA
aaacatttcacaaggcagagtgttttagtactctgtaatgaaaattacagaatctactaaaacaaggcaaaatgccgtgtttatctcgtcaacttgttggcgagatttt

SEQ ID NO: 777 - RNA, 100 nt, synthetic construct
  source 1..100: mol_type = other RNA
catttcacaaggcagagtacgttttagagctagaaatagcaagttaaaataaggctagtccgttatcaacttgaaaaagtggcaccgagtcggtgctttt

SEQ ID NO: 778 - RNA, 109 nt, synthetic construct
  source 1..109: mol_type = other RNA
atttcacaaggcagagtaccggttttagtactctgtaatgaaaattacagaatctactaaaacaaggcaaaatgccgtgtttatctcgtcaacttgttggcgagatttt

SEQ ID NO: 779 - RNA, 109 nt, synthetic construct
  source 1..109: mol_type = other RNA
actcaccggtactctgccttggttttagtactctgtaatgaaaattacagaatctactaaaacaaggcaaaatgccgtgtttatctcgtcaacttgttggcgagatttt

SEQ ID NO: 780 - RNA, 117 nt, synthetic construct
  source 1..117: mol_type = other RNA
gttctgtcttttggtcaggacaaccgtctagctataagtgctgcagggtgtgagaaactcctattgctggacgatgtctcttacgaggcattagcaccacaaggcagagtaccggtg

SEQ ID NO: 781 - RNA, 100 nt, synthetic construct
  source 1..100: mol_type = other RNA
ttcacaaggcagagtaccgggttttagagctagaaatagcaagttaaaataaggctagtccgttatcaacttgaaaaagtggcaccgagtcggtgctttt

SEQ ID NO: 782 - RNA, 100 nt, synthetic construct
  source 1..100: mol_type = other RNA
ctcaccggtactctgccttggttttagagctagaaatagcaagttaaaataaggctagtccgttatcaacttgaaaaagtggcaccgagtcggtgctttt

SEQ ID NO: 783 - RNA, 109 nt, synthetic construct
  source 1..109: mol_type = other RNA
acaaggcagagtaccggtgaggttttagtactctgtaatgaaaattacagaatctactaaaacaaggcaaaatgccgtgtttatctcgtcaacttgttggcgagatttt

SEQ ID NO: 784 - RNA, 100 nt, synthetic construct
  source 1..100: mol_type = other RNA
aattgtactcaccggtactcgttttagagctagaaatagcaagttaaaataaggctagtccgttatcaacttgaaaaagtggcaccgagtcggtgctttt

SEQ ID NO: 785 - RNA, 109 nt, synthetic construct
  source 1..109: mol_type = other RNA
ttgttcctgaatgggaagaaagttttagtactctgtaatgaaaattacagaatctactaaaacaaggcaaaatgccgtgtttatctcgtcaacttgttggcgagatttt

SEQ ID NO: 786 - RNA, 117 nt, synthetic construct
  source 1..117: mol_type = other RNA
gttctgtcttttggtcaggacaaccgtctagctataagtgctgcagggtgtgagaaactcctattgctggacgatgtctcttacgaggcattagcacccattcaggaacaattgcct

SEQ ID NO: 787 - RNA, 109 nt, synthetic construct
  source 1..109: mol_type = other RNA
cattcaggaacaattgcctatgttttagtactctgtaatgaaaattacagaatctactaaaacaaggcaaaatgccgtgtttatctcgtcaacttgttggcgagatttt

SEQ ID NO: 788 - RNA, 100 nt, synthetic construct
  source 1..100: mol_type = other RNA
caattaccaatttctgaaaggttttagagctagaaatagcaagttaaaataaggctagtccgttatcaacttgaaaaagtggcaccgagtcggtgctttt

SEQ ID NO: 789 - RNA, 100 nt, synthetic construct
  source 1..100: mol_type = other RNA
gtcctacaattaccaatttcgttttagagctagaaatagcaagttaaaataaggctagtccgttatcaacttgaaaaagtggcaccgagtcggtgctttt

SEQ ID NO: 790 - RNA, 109 nt, synthetic construct
  source 1..109: mol_type = other RNA
caacctgtgaactcacagagagttttagtactctgtaatgaaaattacagaatctactaaaacaaggcaaaatgccgtgtttatctcgtcaacttgttggcgagatttt

SEQ ID NO: 791 - RNA, 109 nt, synthetic construct
  source 1..109: mol_type = other RNA
atcttccagcatcttgcgttcgttttagtactctgtaatgaaaattacagaatctactaaaacaaggcaaaatgccgtgtttatctcgtcaacttgttggcgagatttt

SEQ ID NO: 792 - RNA, 109 nt, synthetic construct
  source 1..109: mol_type = other RNA
tcgattttccatacatttgtagttttagtactctgtaatgaaaattacagaatctactaaaacaaggcaaaatgccgtgtttatctcgtcaacttgttggcgagatttt

SEQ ID NO: 793 - RNA, 109 nt, synthetic construct
  source 1..109: mol_type = other RNA
ctcctcaagaaaacaccatatgttttagtactctgtaatgaaaattacagaatctactaaaacaaggcaaaatgccgtgtttatctcgtcaacttgttggcgagatttt

SEQ ID NO: 794 - RNA, 109 nt, synthetic construct
  source 1..109: mol_type = other RNA
attaccaggtaaagttcttttgttttagtactctgtaatgaaaattacagaatctactaaaacaaggcaaaatgccgtgtttatctcgtcaacttgttggcgagatttt

SEQ ID NO: 795 - RNA, 100 nt, synthetic construct
  source 1..100: mol_type = other RNA
attaccaggtaaagttctttgttttagagctagaaatagcaagttaaaataaggctagtccgttatcaacttgaaaaagtggcaccgagtcggtgctttt

SEQ ID NO: 796 - RNA, 117 nt, synthetic construct
  source 1..117: mol_type = other RNA
gttctgtcttttggtcaggacaaccgtctagctataagtgctgcagggtgtgagaaactcctattgctggacgatgtctcttacgaggcattagcacacacagaaccctgccattct

SEQ ID NO: 797 - RNA, 109 nt, synthetic construct
  source 1..109: mol_type = other RNA
tgacacagaaccctgccattcgttttagtactctgtaatgaaaattacagaatctactaaaacaaggcaaaatgccgtgtttatctcgtcaacttgttggcgagatttt

SEQ ID NO: 798 - RNA, 109 nt, synthetic construct
  source 1..109: mol_type = other RNA
tcctccaaagtcaactcccgggttttagtactctgtaatgaaaattacagaatctactaaaacaaggcaaaatgccgtgtttatctcgtcaacttgttggcgagatttt

SEQ ID NO: 799 - RNA, 109 nt, synthetic construct
  source 1..109: mol_type = other RNA
cttctcctccaaagtcaactcgttttagtactctgtaatgaaaattacagaatctactaaaacaaggcaaaatgccgtgtttatctcgtcaacttgttggcgagatttt

SEQ ID NO: 800 - RNA, 109 nt, synthetic construct
  source 1..109: mol_type = other RNA
actcctttaacaaaagtcacagttttagtactctgtaatgaaaattacagaatctactaaaacaaggcaaaatgccgtgtttatctcgtcaacttgttggcgagatttt

SEQ ID NO: 801 - RNA, 109 nt, synthetic construct
  source 1..109: mol_type = other RNA
tgtttgccaagagacttgcacgttttagtactctgtaatgaaaattacagaatctactaaaacaaggcaaaatgccgtgtttatctcgtcaacttgttggcgagatttt

SEQ ID NO: 802 - RNA, 109 nt, synthetic construct
  source 1..109: mol_type = other RNA
ttgccaagagacttgcacaaagttttagtactctgtaatgaaaattacagaatctactaaaacaaggcaaaatgccgtgtttatctcgtcaacttgttggcgagatttt

SEQ ID NO: 803 - RNA, 109 nt, synthetic construct
  source 1..109: mol_type = other RNA
ccttacagtcttctgggagtagttttagtactctgtaatgaaaattacagaatctactaaaacaaggcaaaatgccgtgtttatctcgtcaacttgttggcgagatttt

SEQ ID NO: 804 - RNA, 100 nt, synthetic construct
  source 1..100: mol_type = other RNA
ttacagtcttctgggagtaagttttagagctagaaatagcaagttaaaataaggctagtccgttatcaacttgaaaaagtggcaccgagtcggtgctttt

SEQ ID NO: 805 - RNA, 117 nt, synthetic construct
  source 1..117: mol_type = other RNA
gttctgtcttttggtcaggacaaccgtctagctataagtgctgcagggtgtgagaaactcctattgctggacgatgtctcttacgaggcattagcaccttacagtcttctgggagta

SEQ ID NO: 806 - RNA, 109 nt, synthetic construct
  source 1..109: mol_type = other RNA
ttctcttccttacagtcttctgttttagtactctgtaatgaaaattacagaatctactaaaacaaggcaaaatgccgtgtttatctcgtcaacttgttggcgagatttt

SEQ ID NO: 807 - RNA, 100 nt, synthetic construct
  source 1..100: mol_type = other RNA
ctcttccttacagtcttctggttttagagctagaaatagcaagttaaaataaggctagtccgttatcaacttgaaaaagtggcaccgagtcggtgctttt

SEQ ID NO: 808 - RNA, 109 nt, synthetic construct
  source 1..109: mol_type = other RNA
tcccagaagactgtaaggaaggttttagtactctgtaatgaaaattacagaatctactaaaacaaggcaaaatgccgtgtttatctcgtcaacttgttggcgagatttt

SEQ ID NO: 809 - RNA, 100 nt, synthetic construct
  source 1..100: mol_type = other RNA
actgtaaggaagagaagtaagttttagagctagaaatagcaagttaaaataaggctagtccgttatcaacttgaaaaagtggcaccgagtcggtgctttt

SEQ ID NO: 810 - RNA, 109 nt, synthetic construct
  source 1..109: mol_type = other RNA
atttcctttacttctcttcctgttttagtactctgtaatgaaaattacagaatctactaaaacaaggcaaaatgccgtgtttatctcgtcaacttgttggcgagatttt

SEQ ID NO: 811 - RNA, 109 nt, synthetic construct
  source 1..109: mol_type = other RNA
actgtaaggaagagaagtaaagttttagtactctgtaatgaaaattacagaatctactaaaacaaggcaaaatgccgtgtttatctcgtcaacttgttggcgagatttt

SEQ ID NO: 812 - RNA, 100 nt, synthetic construct
  source 1..100: mol_type = other RNA
ctgtaaggaagagaagtaaagttttagagctagaaatagcaagttaaaataaggctagtccgttatcaacttgaaaaagtggcaccgagtcggtgctttt

SEQ ID NO: 813 - RNA, 117 nt, synthetic construct
  source 1..117: mol_type = other RNA
gttctgtcttttggtcaggacaaccgtctagctataagtgctgcagggtgtgagaaactcctattgctggacgatgtctcttacgaggcattagcaccctttacttctcttccttac

SEQ ID NO: 814 - RNA, 109 nt, synthetic construct
  source 1..109: mol_type = other RNA
cacttacacctagatgaaatggttttagtactctgtaatgaaaattacagaatctactaaaacaaggcaaaatgccgtgtttatctcgtcaacttgttggcgagatttt

SEQ ID NO: 815 - RNA, 100 nt, synthetic construct
  source 1..100: mol_type = other RNA
acacttacacctagatgaaagttttagagctagaaatagcaagttaaaataaggctagtccgttatcaacttgaaaaagtggcaccgagtcggtgctttt

SEQ ID NO: 816 - RNA, 117 nt, synthetic construct
  source 1..117: mol_type = other RNA
gttctgtcttttggtcaggacaaccgtctagctataagtgctgcagggtgtgagaaactcctattgctggacgatgtctcttacgaggcattagcaccatctaggtgtaagtgtttc

SEQ ID NO: 817 - RNA, 109 nt, synthetic construct
  source 1..109: mol_type = other RNA
catctaggtgtaagtgtttctgttttagtactctgtaatgaaaattacagaatctactaaaacaaggcaaaatgccgtgtttatctcgtcaacttgttggcgagatttt

SEQ ID NO: 818 - RNA, 100 nt, synthetic construct
  source 1..100: mol_type = other RNA
ctaggtgtaagtgtttcttagttttagagctagaaatagcaagttaaaataaggctagtccgttatcaacttgaaaaagtggcaccgagtcggtgctttt

SEQ ID NO: 819 - RNA, 109 nt, synthetic construct
  source 1..109: mol_type = other RNA
aggttactcaccagagttgtcgttttagtactctgtaatgaaaattacagaatctactaaaacaaggcaaaatgccgtgtttatctcgtcaacttgttggcgagatttt

SEQ ID NO: 820 - RNA, 109 nt, synthetic construct
  source 1..109: mol_type = other RNA
gactgaaaagagagcgttgacgttttagtactctgtaatgaaaattacagaatctactaaaacaaggcaaaatgccgtgtttatctcgtcaacttgttggcgagatttt

SEQ ID NO: 821 - RNA, 100 nt, synthetic construct
  source 1..100: mol_type = other RNA
caagcacacgcattgttggagttttagagctagaaatagcaagttaaaataaggctagtccgttatcaacttgaaaaagtggcaccgagtcggtgctttt

SEQ ID NO: 822 - RNA, 117 nt, synthetic construct
  source 1..117: mol_type = other RNA
gttctgtcttttggtcaggacaaccgtctagctataagtgctgcagggtgtgagaaactcctattgctggacgatgtctcttacgaggcattagcacctccaacaatgcgtgtgctt

SEQ ID NO: 823 - RNA, 109 nt, synthetic construct
  source 1..109: mol_type = other RNA
gccagggccactctccccaaggttttagtactctgtaatgaaaattacagaatctactaaaacaaggcaaaatgccgtgtttatctcgtcaacttgttggcgagatttt

SEQ ID NO: 824 - RNA, 109 nt, synthetic construct
  source 1..109: mol_type = other RNA
cagctcagaggcacctgtgtggttttagtactctgtaatgaaaattacagaatctactaaaacaaggcaaaatgccgtgtttatctcgtcaacttgttggcgagatttt

SEQ ID NO: 825 - RNA, 109 nt, synthetic construct
  source 1..109: mol_type = other RNA
gtgaggacccactggtgtcctgttttagtactctgtaatgaaaattacagaatctactaaaacaaggcaaaatgccgtgtttatctcgtcaacttgttggcgagatttt

SEQ ID NO: 826 - RNA, 109 nt, synthetic construct
  source 1..109: mol_type = other RNA
tcactgctgcccactgctttggttttagtactctgtaatgaaaattacagaatctactaaaacaaggcaaaatgccgtgtttatctcgtcaacttgttggcgagatttt

SEQ ID NO: 827 - RNA, 109 nt, synthetic construct
  source 1..109: mol_type = other RNA
ttacccatcaaagcagtgggcgttttagtactctgtaatgaaaattacagaatctactaaaacaaggcaaaatgccgtgtttatctcgtcaacttgttggcgagatttt

SEQ ID NO: 828 - RNA, 100 nt, synthetic construct
  source 1..100: mol_type = other RNA
ctgctgcccactgctttgatgttttagagctagaaatagcaagttaaaataaggctagtccgttatcaacttgaaaaagtggcaccgagtcggtgctttt

SEQ ID NO: 829 - RNA, 109 nt, synthetic construct
  source 1..109: mol_type = other RNA
tgctgcccactgctttgatgggttttagtactctgtaatgaaaattacagaatctactaaaacaaggcaaaatgccgtgtttatctcgtcaacttgttggcgagatttt

SEQ ID NO: 830 - RNA, 100 nt, synthetic construct
  source 1..100: mol_type = other RNA
acttacccatcaaagcagtggttttagagctagaaatagcaagttaaaataaggctagtccgttatcaacttgaaaaagtggcaccgagtcggtgctttt

SEQ ID NO: 831 - RNA, 100 nt, synthetic construct
  source 1..100: mol_type = other RNA
cacttacccatcaaagcagtgttttagagctagaaatagcaagttaaaataaggctagtccgttatcaacttgaaaaagtggcaccgagtcggtgctttt

SEQ ID NO: 832 - RNA, 109 nt, synthetic construct
  source 1..109: mol_type = other RNA
ggggaagcctaggagagaaaagttttagtactctgtaatgaaaattacagaatctactaaaacaaggcaaaatgccgtgtttatctcgtcaacttgttggcgagatttt

SEQ ID NO: 833 - RNA, 109 nt, synthetic construct
  source 1..109: mol_type = other RNA
ttctctcctaggcttcccctggttttagtactctgtaatgaaaattacagaatctactaaaacaaggcaaaatgccgtgtttatctcgtcaacttgttggcgagatttt

SEQ ID NO: 834 - RNA, 109 nt, synthetic construct
  source 1..109: mol_type = other RNA
ctgcaggatgtttggcgcatcgttttagtactctgtaatgaaaattacagaatctactaaaacaaggcaaaatgccgtgtttatctcgtcaacttgttggcgagatttt

SEQ ID NO: 835 - RNA, 100 nt, synthetic construct
  source 1..100: mol_type = other RNA
agggaatcatgatatcgcctgttttagagctagaaatagcaagttaaaataaggctagtccgttatcaacttgaaaaagtggcaccgagtcggtgctttt

SEQ ID NO: 836 - RNA, 109 nt, synthetic construct
  source 1..109: mol_type = other RNA
ctccaggctcctttgaattacgttttagtactctgtaatgaaaattacagaatctactaaaacaaggcaaaatgccgtgtttatctcgtcaacttgttggcgagatttt

SEQ ID NO: 837 - RNA, 100 nt, synthetic construct
  source 1..100: mol_type = other RNA
ataccagtgtaattcaaagggttttagagctagaaatagcaagttaaaataaggctagtccgttatcaacttgaaaaagtggcaccgagtcggtgctttt

SEQ ID NO: 838 - RNA, 100 nt, synthetic construct
  source 1..100: mol_type = other RNA
acataccagtgtaattcaaagttttagagctagaaatagcaagttaaaataaggctagtccgttatcaacttgaaaaagtggcaccgagtcggtgctttt

SEQ ID NO: 839 - RNA, 100 nt, synthetic construct
  source 1..100: mol_type = other RNA
tacataccagtgtaattcaagttttagagctagaaatagcaagttaaaataaggctagtccgttatcaacttgaaaaagtggcaccgagtcggtgctttt

SEQ ID NO: 840 - RNA, 109 nt, synthetic construct
  source 1..109: mol_type = other RNA
tggaattctgaaacataatttgttttagtactctgtaatgaaaattacagaatctactaaaacaaggcaaaatgccgtgtttatctcgtcaacttgttggcgagatttt

SEQ ID NO: 841 - RNA, 117 nt, synthetic construct
  source 1..117: mol_type = other RNA
gttctgtcttttggtcaggacaaccgtctagctataagtgctgcagggtgtgagaaactcctattgctggacgatgtctcttacgaggcattagcactgtttcagaattccaaaaac

SEQ ID NO: 842 - RNA, 109 nt, synthetic construct
  source 1..109: mol_type = other RNA
ttatgtttcagaattccaaaagttttagtactctgtaatgaaaattacagaatctactaaaacaaggcaaaatgccgtgtttatctcgtcaacttgttggcgagatttt

SEQ ID NO: 843 - RNA, 109 nt, synthetic construct
  source 1..109: mol_type = other RNA
tccggttacccaacagttggtgttttagtactctgtaatgaaaattacagaatctactaaaacaaggcaaaatgccgtgtttatctcgtcaacttgttggcgagatttt

SEQ ID NO: 844 - RNA, 109 nt, synthetic construct
  source 1..109: mol_type = other RNA
gccccatccggttacccaacagttttagtactctgtaatgaaaattacagaatctactaaaacaaggcaaaatgccgtgtttatctcgtcaacttgttggcgagatttt

SEQ ID NO: 845 - RNA, 109 nt, synthetic construct
  source 1..109: mol_type = other RNA
agaagccccatccggttacccgttttagtactctgtaatgaaaattacagaatctactaaaacaaggcaaaatgccgtgtttatctcgtcaacttgttggcgagatttt

SEQ ID NO: 846 - RNA, 100 nt, synthetic construct
  source 1..100: mol_type = other RNA
tcatgcttacctttctccttgttttagagctagaaatagcaagttaaaataaggctagtccgttatcaacttgaaaaagtggcaccgagtcggtgctttt

SEQ ID NO: 847 - RNA, 109 nt, synthetic construct
  source 1..109: mol_type = other RNA
tggttactcacaggtgaaatcgttttagtactctgtaatgaaaattacagaatctactaaaacaaggcaaaatgccgtgtttatctcgtcaacttgttggcgagatttt

SEQ ID NO: 848 - RNA, 117 nt, synthetic construct
  source 1..117: mol_type = other RNA
gttctgtcttttggtcaggacaaccgtctagctataagtgctgcagggtgtgagaaactcctattgctggacgatgtctcttacgaggcattagcacctcacaggtgaaatccaaaa

SEQ ID NO: 849 - RNA, 109 nt, synthetic construct
  source 1..109: mol_type = other RNA
tctacaaaaggtaaatattccgttttagtactctgtaatgaaaattacagaatctactaaaacaaggcaaaatgccgtgtttatctcgtcaacttgttggcgagatttt

SEQ ID NO: 850 - RNA, 109 nt, synthetic construct
  source 1..109: mol_type = other RNA
gaagaatgccagaaaagatatgttttagtactctgtaatgaaaattacagaatctactaaaacaaggcaaaatgccgtgtttatctcgtcaacttgttggcgagatttt

SEQ ID NO: 851 - RNA, 109 nt, synthetic construct
  source 1..109: mol_type = other RNA
ccctgagtcacagtggaaaaagttttagtactctgtaatgaaaattacagaatctactaaaacaaggcaaaatgccgtgtttatctcgtcaacttgttggcgagatttt

SEQ ID NO: 852 - RNA, 109 nt, synthetic construct
  source 1..109: mol_type = other RNA
aatctccctgagtcacagtgggttttagtactctgtaatgaaaattacagaatctactaaaacaaggcaaaatgccgtgtttatctcgtcaacttgttggcgagatttt

SEQ ID NO: 853 - RNA, 109 nt, synthetic construct
  source 1..109: mol_type = other RNA
tccactgtgactcagggagatgttttagtactctgtaatgaaaattacagaatctactaaaacaaggcaaaatgccgtgtttatctcgtcaacttgttggcgagatttt

SEQ ID NO: 854 - RNA, 100 nt, synthetic construct
  source 1..100: mol_type = other RNA
tgaatctccctgagtcacaggttttagagctagaaatagcaagttaaaataaggctagtccgttatcaacttgaaaaagtggcaccgagtcggtgctttt

SEQ ID NO: 855 - RNA, 100 nt, synthetic construct
  source 1..100: mol_type = other RNA
actgtgactcagggagattcgttttagagctagaaatagcaagttaaaataaggctagtccgttatcaacttgaaaaagtggcaccgagtcggtgctttt

SEQ ID NO: 856 - RNA, 109 nt, synthetic construct
  source 1..109: mol_type = other RNA
accacctgaatctccctgagtgttttagtactctgtaatgaaaattacagaatctactaaaacaaggcaaaatgccgtgtttatctcgtcaacttgttggcgagatttt

SEQ ID NO: 857 - RNA, 109 nt, synthetic construct
  source 1..109: mol_type = other RNA
actgtgactcagggagattcagttttagtactctgtaatgaaaattacagaatctactaaaacaaggcaaaatgccgtgtttatctcgtcaacttgttggcgagatttt

SEQ ID NO: 858 - RNA, 100 nt, synthetic construct
  source 1..100: mol_type = other RNA
gtgactcagggagattcagggttttagagctagaaatagcaagttaaaataaggctagtccgttatcaacttgaaaaagtggcaccgagtcggtgctttt

SEQ ID NO: 859 - RNA, 109 nt, synthetic construct
  source 1..109: mol_type = other RNA
ggagcaacctggtgtctacacgttttagtactctgtaatgaaaattacagaatctactaaaacaaggcaaaatgccgtgtttatctcgtcaacttgttggcgagatttt

SEQ ID NO: 860 - RNA, 109 nt, synthetic construct
  source 1..109: mol_type = other RNA
gatgcagtcaccagcatgagagttttagtactctgtaatgaaaattacagaatctactaaaacaaggcaaaatgccgtgtttatctcgtcaacttgttggcgagatttt
